(19) United States
(12) Patent Application Publication
(10) Pub. No.: US 2015/0086982 A1
(43) Pub. Date: Mar. 26, 2015

(54) COMPOSITIONS AND METHODS FOR DETECTING AND DISCRIMINATING BETWEEN YEAST OR MOLD

(71) Applicants: Michael McClellan Becker, San Diego, CA (US); Bettina Groschel, San Diego, CA (US); Anja Bubeck-Barrett, Encinitas, CA (US)

(72) Inventors: Michael McClellan Becker, San Diego, CA (US); Bettina Groschel, San Diego, CA (US); Anja Bubeck-Barrett, Encinitas, CA (US)

(73) Assignee: ROKA BIOSCIENCE, INC., Warren, NJ (US)

(21) Appl. No.: 14/239,322

(22) PCT Filed: Aug. 17, 2012
(86) PCT No.: PCT/US12/51423

§ 371 Date: Nov. 7, 2014

Related U.S. Application Data
(60) Provisional application No. 61/525,317, filed on Aug. 19, 2011.

(51) Int. Cl. C12Q 1/68

(52) U.S. Cl. CPC C12Q 1/6895; C12Q 2600/158
USPC 435/6.11

(57) ABSTRACT

The invention features compositions, methods, and kits for detecting and distinguishing between yeast or mold in a sample suspected of being contaminated with yeast or mold.

### CROSS-REFERENCE TO RELATED APPLICATIONS

[0001] This application claims benefit of U.S. Provisional Application No. 61/525,317, filed Aug. 19, 2011, the contents of which are hereby incorporated by reference in their entirety.

### FIELD OF THE INVENTION

[0002] The invention features compositions, methods, and kits for detecting and discriminating between the presence of mold and yeast in a sample (e.g., from a food, water, or environmental product or process, an industrial product or process, a pharmaceutical product or process, or a biological tissue, such as blood). The invention features probes and primers that specifically hybridize to mold or yeast nucleic acid molecules (e.g., endogenous chitin synthase genes or ribonucleic acid (RNA) molecules). The primers can be used in conjunction with a transcription-mediated amplification (TMA) assay or a polymerase chain reaction (PCR) assay. The amplified DNA or RNA products generated by the primers can be assayed using mold-specific or yeast or mold-specific probes that can be used to confirm the presence of mold only, mold and yeast, or yeast only in the sample. Thus, the primers and probes of the present invention allow for early detection of, and discrimination between, yeast or mold, in samples suspected of containing these contaminants, relative to the current standard method of culturing from such samples.

### BACKGROUND OF THE INVENTION

[0003] Diagnosing mold and/or yeast infection or infiltration/contamination continues to be a major challenge in clinical, manufacturing, and environmental settings. In addition to the time required to grow the mold or yeast from samples, such as a blood culture or manufacturing production samples or reagents, additional time is needed to identify and speciate the organism. All of this testing can become a very lengthy process, which leaves the infection or contamination unchecked and may lead to an increased fungal load or presence.

[0004] In addition, most regulatory agencies require, and customers demand, specific testing for contaminating microorganisms that are common to specific food types and agricultural products, prevalent in the utility (e.g., water and wastewater treatment) and pharmaceutical industries, and that are capable of in vivo multiplication. Rapid and accurate methods for detection of foodborne and waterborne contaminating microorganisms are essential, particularly in the context of food manufacturing processes, pharmaceutical industry, drinking water, and other regulated industrial processes. The same applies to the general detection of human, animal, and plant pathogens. Many manufacturers and utilities have, consequently, had to build in-house labs to expedite the testing, or lose valuable time waiting for test results when samples are shipped out to outside labs. Furthermore, using art-recognized and current standard methods, the cost of enrichment media used to expand the numbers of one or more particular microorganisms to detectable levels can be substantial.

[0005] Thus, there remains a need in the art for methods and kits for detecting the presence of, and discriminating between, microorganisms, such as yeast or mold in a sample in a timely and efficient manner and, when necessary, in remote test locations.

### SUMMARY OF THE INVENTION

[0006] The present invention relates to compositions, reaction mixtures, kits and methods for amplifying and detecting nucleic acids from various species of fungi, including compositions and methods of the invention can be used to distinguish between yeast or mold in a sample.

[0007] Accordingly, the invention features a method for detecting and distinguishing between yeast or mold in a sample suspected of being contaminated with the yeast or mold including: a) contacting nucleic acid molecules from the sample with a mold-specific probe or a yeast or mold-specific probe under hybridization conditions, where the mold-specific probe is capable of specifically binding to a mold-specific region including at least 17 (e.g., at least 18, 19, 20, 21, 22, 23, 24, or 25) contiguous base pairs within an endogenous chitin synthase gene of the mold but not to a yeast or mold-specific region of the endogenous chitin synthase gene, where the mold-specific region shares greater than 72% (e.g., greater than about 75%, greater than about 80%, greater than about 85%, greater than about 90%, or greater than about 95%) sequence identity between two or more (e.g., at least 3, 5, 10, 15, or 20 or more, e.g., up to 50 or more) different species of the mold, and where the yeast or mold-specific probe is capable of specifically binding to a yeast or mold-specific region including at least 17 (e.g., at least 18, 19, 20, 21, 22, 23, 24, or 25) contiguous base pairs within an endogenous 1,3-β-glucan synthase gene of the yeast or mold, where the yeast or mold-specific region shares greater than 70% (e.g., greater than about 75%, greater than about 80%, greater than about 85%, greater than about 90%, or greater than about 95%) sequence identity between two or more (e.g., at least 3, 5, 10, 15, or 20 or more, e.g., up to 50 or more) different species of the yeast or mold; and b) detecting hybridization between the mold-specific or the yeast or mold-specific probe and the nucleic acid molecules, where hybridization of the mold-specific probe with the nucleic acid molecule indicates the presence of the mold in the sample; or hybridization of the yeast or mold-specific probe with the nucleic acid molecule indicates the presence of the yeast or mold in the sample. In some embodiments, the endogenous chitin synthase gene is of class I, II, III, IV, V, VI, or VII (e.g., class III, such as any sequence having at least 70% (e.g., at least 80%, 85%, 90%, 95%, 98%, 99%, or even 100%) sequence identity to a sequence of any one of SEQ ID NOs:1-64). In some embodiments, endogenous 1,3-β-glucan synthase gene is any sequence having at least 70% (e.g., at least 80%, 85%, 90%, 95%, 98%, 99%, or even 100%) sequence identity to a sequence of any one of

[0008] In some embodiments, the endogenous chitin synthase gene specifically bound by the mold-specific probe is a chitin synthase class III gene. In some embodiments, the mold-specific region includes at least about 17 (e.g., at least 18, 19, 20, 21, 22, 23, 24, or 25) contiguous base pairs within the region of nucleotides 2859 to 2968 of the chitin synthase class III gene, or a ribonucleic acid (RNA) product thereof.

[0009] In some embodiments, the endogenous 1,3-β-glucan synthase gene specifically bound by the yeast or mold-specific probe is a 1,3-β-glucan synthase gene. In some embodiments, the yeast or mold-specific region includes at least about 17 (e.g., at least 18, 19, 20, 21, 22, 23, 24, or 25) contiguous base pairs within the region of nucleotides 5360 to 5515 of the 1,3-β-glucan synthase 1 gene, or a ribonucleic acid (RNA) product thereof.

[0010] In some embodiments, the method includes incubating the mold-specific and yeast or mold-specific probes with the nucleic acid molecules under hybridization conditions (e.g., stringent conditions, such as any described herein), where hybridization of the mold-specific probe and the yeast or mold-specific probe with the nucleic acid molecules indicates the presence of the mold only or the yeast and the mold in the sample; and hybridization of the mold-specific probe, but not the yeast or mold-specific probe, with the nucleic acid molecule indicates the presence of the mold but not the yeast in the sample; and hybridization of the yeast or mold-specific probe, with the nucleic acid molecule indicates the presence of the yeast or mold. In some embodiments, a difference in hybridization signal intensity (e.g., a difference in intensity of at least about 2-fold, about 5-fold, about 10-fold, about 50-fold, about 100-fold, about 500-fold, about 1,000-fold, about 5,000-fold, about 10,000-fold, or more) between the mold-specific probe relative to the yeast or mold-specific probe indicates the presence of the yeast in the sample.

[0011] In any of the embodiments described herein, prior to contacting step a), the method includes amplifying the nucleic acid molecules from the sample. In some embodiments, amplifying includes: (a) contacting the sample including the nucleic acid molecules with a first amplification primer having a target sequence specific for a 5′ region of the endogenous chitin synthase gene or RNA of the mold and/or a second amplification primer having a target sequence specific for a 5′ region of the 1,3-β-glucan synthase gene or RNA; and (b) performing a nucleic acid amplification reaction to produce a first and/or second amplification product, respectively. In particular embodiments, the first and/or second amplification product includes a region of at least about 15 (e.g., at least about 20, about 30, about 40, about 50, about 60, or more) contiguous base pairs that are conserved between different fungal microorganisms. In some embodiments, the region is conserved between different yeast. In other embodiments, the region is conserved between different molds. In some embodiments, the region includes about 20 to about 100 (e.g., at least about 30, about 40, about 50, about 60, about 70, about 80, about 90, or about 100) base pairs.

[0012] In some embodiments, the mold-specific probe includes a sequence having at least 70% (e.g., at least about 80%, about 85%, about 90%, about 95%, about 99%, or more, even 100%) sequence identity to a complementary sequence including at least 17 (e.g., at least 18, 19, 20, 21, 22, 23, 24, or 25) contiguous nucleotides within the sequence of SEQ ID NO:153.

[0013] In some embodiments, the mold-specific probe includes a sequence having at least 70% (e.g., at least about 80%, about 85%, about 90%, about 95%, about 99%, or more, even 100%) sequence identity to a complementary sequence including 17 to 100 (e.g., at least about 20, about 25, about 30, about 35, about 40, about 45, about 50, about 55, about 60, about 65, about 70, about 75, about 80, about 85, about 90, or about 95) contiguous nucleotides within nucleotides 2850 to 2970 of the sequence of any one of SEQ ID NOs:1-42.

[0014] In some embodiments, the yeast or mold-specific probe includes a sequence having at least 70% (e.g., at least about 80%, about 85%, about 90%, about 95%, about 99%, or more, even 100%) sequence identity to a complementary sequence including at least 15 (e.g., at least 15 to 60, or at least 17, 18, 19, 20, 21, 22, 23, 24, 25, 30, 35, 40, 45, 50, 55, or 60) contiguous nucleotides within the sequence of SEQ ID NO:154.

[0015] In some embodiments, the yeast or mold-specific probe includes a sequence having at least 70% (e.g., at least about 80%, about 85%, about 90%, about 95%, about 99%, or more, even 100%) sequence identity to a complementary sequence including 17 to 100 (e.g., at least about 20, about 25, about 30, about 35, about 40, about 45, about 50, about 55, about 60, about 65, about 70, about 75, about 80, about 85, about 90, or about 95) contiguous nucleotides within nucleotides 5360 to 5515 of the sequence of any one of SEQ ID NOs:65-125.

[0016] In any of the embodiments described herein, the yeast or mold-specific probe binds to the yeast or mold-specific region within the yeast and mold.

[0017] In any of the embodiments described herein, the method distinguishes between the presence of the mold and the yeast in the sample.

[0018] In any of the embodiments described herein, the mold is selected from phylum Ascomycota (e.g., Ajellomyces spp., Alternaria spp., Aschersonia spp., Aspergillus spp., Arthroderma spp., Ascochyta spp., Bipolaris spp., Blastomyces spp., Botryotinia spp., Chaetomium spp., Cladosporium spp., Coccidioides spp., Curvularia spp., Emericella spp., Emmonsia spp., Epicoccum spp., Exophiala spp., Fusarium spp., Geomyces spp., Geotrichum spp., Gibberella spp., Histoplasma spp., Magnaporthe spp., Metarhizium spp., Monascus spp., Mycospaerella spp., Nectria spp., Neosartorya spp., Neurospora spp., Paecilomyces spp., Paracoccidioides spp., Penicillium spp., Phaeosphaeria spp., Phialemonium spp., Podospora spp., Pyrenophora spp., Sclerotinia spp., Scopulariopsis spp., Sporothrix spp., Stachybotrys spp., Stemphylium spp., Talaromyces spp., Trichophyton spp., Trichothecium spp., Tricoderma spp., Tuber spp., Uncinocarpus spp., or Verticillium spp.), phylum Basidomycota (e.g., Moniliophthora spp., Sporobolomyces spp., Trichosporon spp., Ustilago spp., Cryptococcus spp. or Rhodotorula spp.),), phylum Chytridiomycota, phylum Zygomycota (e.g., Absidia spp., Amylomyces spp., Pilaira spp., Rhizomucor spp., Rhizopus spp., or Zygomycetes spp.), and phylum Oomycota in the Stramenopila kingdom.

[0019] In some embodiments, the yeast is selected from phylum Ascomycoata (e.g., Ajellomyces spp., Alternaria spp., Aschersonia spp., Aspergillus spp., Arthroderma spp., Ascochyta spp., Bipolaris spp., Blastomyces spp., Botryotinia spp., Chaetomium spp., Cladosporium spp., Coccidioides spp., Curvularia spp., Emericella spp., Emmonsia spp., Epicoccum spp., Exophiala spp., Fusarium spp., Geomyces spp., Geotrichum spp., Gibberella spp., Histoplasma spp., Magnaporthe spp., Metarhizium spp., Monascus spp., Mycospaerella spp., Nectria spp., Neosartorya spp., Neurospora spp., Paecilomyces spp., Paracoccidioides spp., Penicillium spp., Phaeosphaeria spp., Phialemonium spp., Podospora spp., Pyrenophora spp., Sclerotinia spp., Scopulariopsis spp., Sporothrix spp., Stachybotrys spp., Stemphylium spp., Talaromyces spp., Trichophyton spp., Trichothecium spp., Tricoderma spp., Tuber spp., Uncinocarpus spp., or Verticillium spp., such as Candida spp., Clavispora spp., Debaryomyces spp., Dekkera spp., Kluyveromyces spp., Pichia spp., Saccaromyces spp., Torulaspora spp., Vanderwaltozyma spp., Yarrowia spp., or Zygosaccharomyces spp.) and phylum Basidomycota (e.g., Moniliophthora spp., Sporobolomyces spp., Trichosporon spp., Ustilago spp., Cryptococcus spp., or Rhodotorula spp, such as Cryptococcus spp., or Rhodotorula spp).

[0020] In any of the embodiments described herein, the sample is selected from the group of an agricultural product (e.g., a fruit, such as a tomato, a pepper, a grape, an apple, an orange, a lemon, or a berry; a vegetable; a grain; forage; a silage; a juice; a wood; a flower; or a seed) or process, an industrial product or process, an environmental product or process, a food product or process, a pharmaceutical product or process, a water-based product or process, a wood product, a textile, and a tissue product (e.g., blood, urine, or serum).

[0021] In any of the embodiments described herein, the method includes lysing (e.g., mechanical or chemical lysis) cells present in the sample.

[0022] In any of the embodiments described herein, prior to contacting step a), the method includes denaturing complementary strands of the nucleic acid molecules.

[0023] In any of the embodiments described herein, the nucleic acid molecules include deoxyribonucleic acid molecules (DNA).

[0024] In one aspect, the invention also features a kit including (i) a first container including any mold-specific probe described herein, (ii) a second container including any yeast or mold-specific probe described herein, and (iii) instructions for performing any method described herein for detecting and discriminating between mold or yeast in a sample.

[0025] In some embodiments, the mold-specific probe and the yeast or mold-specific probe include different detectable labels (e.g., a radionuclide, a ligand (e.g., biotin or avidin), a hapten, an enzyme, an enzyme substrate, a reactive group, a chromophore (e.g., dye, particle, such as a latex or a metal particle, or bead that imparts detectable color), a luminescent compound (e.g., a bioluminescent, a phosphorescent, or a chemiluminescent label), a fluorophore, or a label, such as a homogeneous label).

[0026] In another aspect, the invention features a kit including (i) a container including any mold-specific probe described herein and any yeast or mold-specific probe described herein, where the mold-specific and yeast or mold-specific probes include different detectable labels; and (ii) instructions for performing any method described herein for detecting and discriminating between mold or yeast in a sample.

[0027] In any of the embodiments and aspects described herein, the nucleic acid molecules (e.g., probes) can include any modification described herein (e.g., a 3′ end modification to prevent initiation of DNA synthesis, such as a 3′ end methoxy modification; a 5′ end derivatization, such as a thiol group (e.g., a trityl-hexyl thiol group); a 2′ modification of the ribose, such as a methoxy modification at the 2′ position of ribose; a locked nucleic acid modification, such as a methylene bridge connecting the 2′-O atom and the 4′-C atom of ribose; a backbone modification, such as a phosphothioate modification; or a label, such as any described herein, e.g., a chemiluminescent label, a fluorophore, a hapten, an enzyme, or one of a donor/acceptor pair). In some embodiments, the nucleic acid molecules include one or more deoxyribonucleotides, ribonucleotides, peptide nucleic acids, or combinations thereof. In some embodiments, the nucleic acid molecules (e.g., probes) include SMART oligonucleotides, as described herein. In particular embodiments, the SMART oligonucleotide comprises a tag sequence at the 5′ end, where the tag sequence includes at least 70% (e.g., at least about 80%, about 85%, about 90%, about 95%, about 99%, or more, even 100%) sequence identity to a complementary sequence including at least 5 (e.g., at least 6, 7, 8, 9, 10, 11, 12, 13, 14, 15, 16, 17, 18, 19, 20, 21, 22, 23, 24, 25, 30, 35, 40, 45, 50, 55, or 60) contiguous nucleotides from the 3′ end of the tag sequence. In other embodiments, the tag sequence has a closed structure (e.g., a hairpin structure), where the 5′ end binds the 3′ end of the sequence (e.g., under stringent conditions, at an amplification temperature of at least about 40° C., such as about 42° C., or under stringent conditions at an amplification temperature of at least about 40° C., such as about 42° C.).

### DEFINITIONS

[0028] By “about” is meant +/−10% of any recited value.

[0029] By “consisting essentially of” is meant that additional component(s), composition(s), or method step(s) that do not materially change the basic and novel characteristics of the present invention may be included in the present invention. Any component(s), composition(s), or method step(s) that have a material effect on the basic and novel characteristics of the present invention would fall outside of this term.

[0030] A “label” refers to a molecular moiety or compound that is detected or leads to a detectable signal. A label may be joined directly or indirectly to a nucleic acid probe. Direct labeling can occur through bonds or interactions that link the label to the probe, including covalent bonds or non-covalent interactions, e.g. hydrogen bonds, hydrophobic and ionic interactions, or formation of chelates or coordination complexes. Indirect labeling can occur through use of a bridging moiety or linker (e.g., antibody or additional oligomer), which is either directly or indirectly labeled, and which may amplify the detectable signal. Labels include any detectable moiety, such as a radionuclide, ligand (e.g., biotin or avidin), enzyme, enzyme substrate, reactive group, chromophore (e.g., a dye, a particle, or a bead that imparts detectable color), luminescent compound (e.g., bioluminescent, phosphorescent, or chemiluminescent labels), or fluorophore. Preferred labels include a “homogeneous detectable label” that provides a detectable signal in a homogeneous fashion (i.e., without physically removing bound labels from unbound forms of the label) in which bound (e.g., hybridized) labeled probe in a mixture exhibits a detectable change that differs from that of unbound labeled probe, e.g., stability or differential degradation (e.g., U.S. Pat. No. 5,283,174, Arnold et al.; U.S. Pat. No. 5,656,207, Woodhead et al.; U.S. Pat. No. 5,658,737, Nelson et al.). Preferred labels include chemiluminescent compounds, preferably acridinium ester (“AE”) compounds that include standard AE and derivatives thereof (described in U.S. Pat. Nos. 5,656,207, 5,658,737, and 5,639,604). Methods of synthesis and attaching labels to nucleic acids and detecting signals from labels are well known (e.g., Sambrook et al., Molecular Cloning, A Laboratory Manual, 2nd ed. (Cold Spring Harbor Laboratory Press, Cold Spring Harbor, N.Y., 1989), Chpt. 10; U.S. Pat. Nos. 5,658,737, 5,656,207, 5,547,842, 5,283,174, and 4,581,333).

[0031] As used herein, a “detectable label” is a chemical species that can be detected or can lead to a detectable response. Detectable labels in accordance with the invention can be linked to polynucleotide probes either directly or indirectly, and include radioisotopes, enzymes, haptens, chromophores such as dyes or particles that impart a detectable color (e.g., latex beads or metal particles), luminescent compounds (e.g., bioluminescent, phosphorescent or chemiluminescent moieties) and fluorescent compounds. Fluorescent dyes that bind specifically to double-stranded DNA are still other examples of detectable labels.

[0032] The term “endogenous” within the context of the current invention refers to any polynucleotide, polypeptide, or protein sequence that is a natural part of a cell or organism regenerated from said cell and is not introduced to the cell or organism through human intervention or artifice.

[0033] By “endogenous chitin synthase gene” is meant a chitin synthase gene that is native to an organism and is not introduced to the organism through human intervention or artifice. Examples of endogenous chitin synthases include, but are not limited to, chitin synthases of classes I, II, III, IV, V, VI, and VII (GENBANK ACCESSION NOs: and NCBI Reference Sequence Nos. of chitin synthase class III are summarized in FIGS. 3 and 4).

[0034] By “1,3-β-glucan synthase (FKS1) gene” is meant a 1,3-β-glucan synthase gene that is native to an organism and is not introduced to the organism through human intervention or artifice (GENBANK ACCESSION NOs. and NCBI Reference Sequence NOs of 1,3-β-glucan synthase are summarized in FIGS. 6 and 7).

[0035] By “mold-specific probe” or “mold-specific primer” is meant a first nucleic acid molecule that selectively hybridizes to a second nucleic acid molecule (e.g., a gene or ribonucleic acid (RNA) product thereof) that is endogenous to a mold cell but does not selectively hybridize to a second nucleic acid molecule that is endogenous to a yeast cell.

[0036] By “mold-specific region” of a nucleic acid molecule (e.g., a gene or RNA product thereof) is meant a portion of the nucleic acid molecule (e.g., a span of about 10 base pairs to about 50 base pairs, more preferably about 10 to about 30 base pairs, and most preferably about 17 to about 20 base pairs) that selectively hybridizes to a mold-specific probe or primer but not to a yeast-specific probe or primer.

[0037] The interchangeable terms “oligo,” “oligomer,” and “oligonucleotide” refer to a nucleic acid having generally less than 1,000 nucleotides (nt), including polymers in a range having a lower limit of about 2 nt to 5 nt and an upper limit of about 500 nt to 900 nt. Preferred oligomers are in a size range having a lower limit of about 5 nt to 25 nt and an upper limit of about 50 nt to 600 nt, and particularly preferred embodiments are in a range having a lower limit of about 10 nt to 20 nt and an upper limit of about 22 nt to 100 nt. Preferred oligomers are synthesized by using any well known enzymatic or chemical method and purified by standard methods, e.g., chromatography.

[0038] By “sample” or “test sample” is meant any substance suspected of containing a target organism or nucleic acid derived from the target organism, including but not limited to plant or animal materials, waste materials, materials for forensic analysis, any tissue, cell, or extract derived from a living or dead organism which may contain a target nucleic acid. The sample may include any tissue or polynucleotide-containing material obtained from a human or animal, or it may include an environmental, laboratory-derived, or synthetic sample, a seed stock, or any other types of material where the presence of specific fungal organisms (e.g., yeast or mold) may need to be monitored. For example, samples may be obtained from environmental sources, e.g., water, soil, slurries, debris, biofilms from containers of aqueous fluids, airborne particles, or aerosols, and the like, which may include processed samples, such as those obtained from passing an environmental sample over or through a filter, by centrifugation, or by adherence to a medium, matrix, or support. “Biological samples” include any tissue or material derived from a living or dead mammal, including humans, which may contain a fungal organism or target nucleic acid derived therefrom, e.g., respiratory tissue or exudates such as bronchoscopy, bronchoalveolar lavage (BAL) or lung biopsy, sputum, peripheral blood, bone marrow, plasma, serum, lymph node, gastrointestinal tissue, urine, feces, semen, exudates, or other body fluids and the like. A sample may be treated to physically or mechanically disrupt aggregates or cells to release intracellular components, including nucleic acids, into a solution which may contain other components, such as enzymes, buffers, salts, detergents and the like.

[0039] The substance may be, for example, an unprocessed clinical specimen, a buffered medium containing the specimen, a medium containing the specimen and lytic agents for releasing nucleic acid belonging to the target organism, or a medium containing nucleic acid derived from the target organism which has been isolated and/or purified in a reaction receptacle or on a reaction material or device. In the claims, the terms “sample” and “test sample” may refer to specimen in its raw form or to any stage of processing to release, isolate, and purify nucleic acid derived from target organisms in the specimen. Thus, within a method of use claim, each reference to a “sample” or “test sample” may refer to a substance suspected of containing nucleic acid derived from the target organism or organisms at different stages of processing and is not limited to the initial form of the substance in the claim.

[0040] “Sample preparation” refers to any steps or methods that prepare a sample for subsequent amplification and detection of fungal (e.g., yeast or mold) nucleic acids present in the sample. Sample preparation may include any known method of concentrating components from a larger sample volume or from a substantially aqueous mixture, e.g., by filtration or trapping of airborne particles from an air sample or fungus from a water sample. Sample preparation may include lysis of cellular components and removal of debris, e.g., by filtration or centrifugation, and may include use of nucleic acid oligomers to selectively capture the target nucleic acid from other sample components. Sample preparation may also include “separating,” “isolating,” or “purifying,” which refers to removing one or more components from a complex mixture, such as a sample. Sample components may include target and non-target nucleic acids, and other materials such as salts, acids, bases, detergents, proteins, carbohydrates, lipids and other organic or inorganic materials. Preferably, a separating, isolating or purifying step removes at least 70%, preferably at least 90%, and more preferably about 95% of the target nucleic acids away from other sample components. A separating, isolating or purifying step may optionally include additional washing steps to remove non-target sample components.

[0041] By “selectively hybridizing” or “selective hybridization” or “selectively hybridizes” is meant hybridization, under stringent hybridization conditions, of a first nucleic acid molecule (e.g., a probe or primer) to a specified second nucleic acid molecule (e.g., a target sequence) to a detectably greater degree than its hybridization to non-target nucleic acid sequences and/or to the substantial exclusion of non-target nucleic acids. Selectively hybridizing sequences have at least 80% sequence identity, preferably 90% sequence identity, and most preferably 100% sequence identity (i.e. complementary) with each other. “Percentage of sequence identity” is determined by comparing two optimally aligned sequences over a comparison window, wherein the portion of the polynucleotide sequence in the comparison window may comprise additions or deletions (i.e., gaps) as compared to the reference sequence (which does not comprise additions or deletions) for optimal alignment of the two sequences. The percentage is calculated by determining the number of positions at which the identical nucleic acid base or amino acid residue occurs in both sequences to yield the number of matched positions, dividing the number of matched positions by the total number of positions in the window of comparison and multiplying the result by 100 to yield the percentage of sequence identity.

[0042] The terms “stringent conditions” or “stringent hybridization conditions” refer to conditions under which a probe will hybridize to its target sequence, to a detectably greater degree than other sequences. Stringent conditions are sequence-dependent and will be different in different circumstances. Longer sequences hybridize specifically at higher temperatures. Generally, stringent conditions are selected to be about 5° C. lower than the thermal melting point (Tₘ) for the specific sequence at a defined ionic strength and pH. The Tₘ is the temperature (under defined ionic strength and pH) at which 50% of a complementary target sequence hybridizes to a perfectly matched probe. Typically, stringent conditions will be those in which the salt concentration is less than about 1.0 M Na ion, typically about 0.01 to 1.0 M Na ion concentration (or other salts) at pH 7.0 to 8.3 and the temperature is at least about 30° C. for short probes (e.g., 10 to 50 nucleotides) and at least about 60° C. for long probes (e.g., greater than 50 nucleotides). Stringent conditions may also be achieved with the addition of destabilizing agents such as formamide. Exemplary low stringency conditions include hybridization with a buffer solution of 30% formamide, 1 M NaCl, 1% SDS at 37° C., and a wash in 2×SSC at 50° C. Exemplary high stringency conditions include hybridization in 50% formamide, 1 M NaCl, 1% SDS at 37° C., and a wash in 0.1×SSC at 60° C.

[0043] By “substantially corresponding,” or “substantially corresponds” is meant that the subject oligonucleotide has a base sequence containing an at least 10 contiguous base region (more preferably 15, 20, 25, or 30 contiguous base region) that is at least 80% homologous, preferably at least 90% homologous, and most preferably 95%, 97%, or 100% homologous to an at least 10 contiguous base region (more preferably 15, 20, 25, or 30 contiguous base region) present in a reference base sequence (excluding RNA and DNA equivalents). Those skilled in the art will readily appreciate modifications that could be made to the hybridization assay conditions at various percentages of homology to permit hybridization of the oligonucleotide to the target sequence while preventing unacceptable levels of non-specific hybridization. The degree of similarity is determined by comparing the order of nucleobases making up the two sequences and does not take into consideration other structural differences that may exist between the two sequences, provided the structural differences do not prevent hydrogen bonding with complementary bases. The degree of homology between two sequences can also be expressed in terms of the number of base mismatches present in each set of at least 10 contiguous bases (more preferably 15, 20, 25, or 30 contiguous bases) being compared, which may range from 0 to 2 base differences.

[0044] By “substantially complementary” is meant that the subject oligonucleotide has a base sequence containing an at least 10 contiguous base region (more preferably 15, 20, 25, or 30 contiguous base region) that is at least 80% complementary, preferably at least 90% complementary, and most preferably 95%, 97%, or 100% complementary to an at least 10 contiguous base region (more preferably 15, 20, 25, or 30 contiguous base region) present in a target nucleic acid sequence (excluding RNA and DNA equivalents). Those skilled in the art will readily appreciate modifications that could be made to the hybridization assay conditions at various percentages of complementarity to permit hybridization of the oligonucleotide to the target sequence while preventing unacceptable levels of non-specific hybridization. The degree of complementarity is determined by comparing the order of nucleobases making up the two sequences and does not take into consideration other structural differences which may exist between the two sequences, provided the structural differences do not prevent hydrogen bonding with complementary bases. The degree of complementarity between two sequences can also be expressed in terms of the number of base mismatches present in each set of at least 10 contiguous bases being compared, which may range from 0 to 2 base mismatches.

[0045] By “yeast or mold-specific probe,” “yeast/mold-specific probe,” “yeast or mold-specific primer,” or “yeast/mold-specific primer” is meant a first nucleic acid molecule that selectively hybridizes to a second nucleic acid molecule (e.g., a gene or ribonucleic acid (RNA) product thereof) that is endogenous to either a yeast or a mold cell or to both yeast and mold cells.

[0046] By “yeast or mold-specific region” or “yeast/mold-specific region” of a nucleic acid molecule (e.g., a gene or RNA product thereof) is meant a portion of the nucleic acid molecule (e.g., a span of about 10 base pairs to about 50 base pairs, more preferably about 10 to about 30 base pairs, and most preferably about 17 to about 20 base pairs within a gene, RNA, or cDNA) that selectively hybridizes to a yeast or mold-specific probe or primer.

[0047] Other features and advantages of the invention will be apparent from the following detailed description, the drawings, and the claims.

### BRIEF DESCRIPTION OF THE DRAWINGS

[0048] FIG. 1 is a schematic showing the phylogenetic relationships of chitin synthases in fungi.

[0049] FIG. 2 is a comparison showing a pairwise identity in a region of nucleic acid sequence of Chitin Synthase class III from different molds (SEQ ID NOs: 1-42) relative to the consensus sequence 1 (SEQ ID NO: 153).

[0050] FIG. 3 is a table showing Genbank Accession Nos. and NCBI Reference Sequence Nos. for chitin synthase class III genes from several molds (SEQ ID NOs: 1-42).

[0051] FIG. 4 is a table showing patents covering chitin synthase class III gene sequences for several molds (SEQ ID NOs: 43-64).

[0052] FIG. 5 is a comparison showing a pairwise identity in a region of nucleic acid sequence of 1,3-β-glucan synthase (FKS1) from different yeasts and molds (SEQ ID NOs: 65-125) relative to the consensus sequence 2 (SEQ ID NO: 154).

[0053] FIG. 6 is a table showing Genbank Accession Nos. and NCBI Reference Sequence Nos. for 1,3-β-glucan synthase (FKS1) genes for several yeasts and molds (SEQ ID NOs: 65-125).

[0054] FIG. 7 is a table showing patents covering 1,3-β-glucan synthase (FKS1) gene sequences for several yeasts and molds (SEQ ID NOs: 126-152).

[0055] FIG. 8 is a schematic showing the general principles of reverse transcription-mediated amplification (RTMA) according to the present invention.

[0056] FIG. 9 shows exemplary oligo sequences targeting Chitin Synthase class III for use in the RTMA methods of the present invention (SEQ ID NOs: 155-159).

[0057] FIG. 10 is a table listing the mold species that were included in an inclusivity panel for detection by the yeast/mold assay of the present invention using the Chitin Synthase class III oligo sequences of FIG. 9.

[0058] FIG. 11 is a graph showing amplification of the indicated mold species using the Chitin Synthase class III-specific oligos of FIG. 9 and 1×10⁵ copies of genomic DNA as the target input.

[0059] FIG. 12 is a graph showing amplification of the indicated mold species using the Chitin Synthase class III-specific oligos of FIG. 9 and 1×10⁴ copies of genomic DNA as the target input.

[0060] FIG. 13 is a graph showing amplification of the indicated mold species using the Chitin Synthase class III-specific oligos of FIG. 9 and 1×10³ copies of genomic DNA as the target input.

[0061] FIG. 14 is a table listing the yeast species that were included in an exclusivity panel and that were used to test mold-specific detection using the Chitin Synthase class III oligo sequences of FIG. 9.

[0062] FIG. 15 is a graph showing that DNA (1×10⁶ copies of genomic DNA as the target input) from the yeast species listed in the table of FIG. 14 was not amplified by the Chitin Synthase class III-specific oligos of FIG. 9 using the methods of the present invention. As a positive control, DNA (1×10⁵ copies of genomic DNA as the target input) from two mold species were amplified using the Chitin Synthase class III-specific oligos of FIG. 9.

### DETAILED DESCRIPTION

[0063] The present invention relates to compositions, reaction mixtures, kits and methods for amplifying and detecting nucleic acids from various species of fungi. In particular, the compositions and methods of the invention can be used to distinguish between yeast or mold in a sample. Nucleic acid molecules obtained from a sample (e.g., tissue sample (e.g., blood), food, water, industrial, or environmental sample) can be amplified and used for nucleic acid detection, probe-based nucleic acid detection, and real-time probe-based nucleic acid detection. The sample can be a solid or semi-solid sample that is diluted with a suitable liquid (e.g., a buffer or water), or a liquid sample, such as raw and processed liquid foods, environmental samples, water, wastewater, samples taken by impingers and filtration, pharmaceuticals, and other such samples.

[0064] In certain aspects and embodiments, particular regions of chitin synthase genes or RNAs (e.g., the chitin synthase class III gene or RNA) and/or regions of 1,3-β-glucan synthase (FKS1) genes or RNAs have been identified as preferred targets for detecting at least one fungal species (mold, yeast, or both) in a sample. The target nucleic acid can be subjected to a nucleic acid amplification reaction prior to the detection step. Compositions of the current invention include one or more separate oligomers (e.g., primers and probes) useful in the amplification and detection of at least one fungal species (and preferably the oligomers allow discrimination between yeast and mold). Samples can be from any source suspected of containing a fungal species.

[0065] One object of the invention is to provide an assay procedure for rapid and easy identification of the presence of mold and/or yeast in a sample. The assay can also be used to discriminate between mold and yeast in a sample. A broad range of mold and/or yeast can be detected by the assay using, e.g., DNA or RNA probes that specifically hybridize to target sequences, e.g., sequences within one or more regions of endogenous chitin synthase genes and/or one or more regions of 1,3-β-glucan synthase (FKS1) genes. Hybridization to one or more of the target sequences allows not only detection of a fungal species (e.g., yeast or mold), but also discrimination between mold and yeast in the sample.

[0066] In several embodiments, the probe or primer that specifically hybridizes to an endogenous chitin synthase gene is about 17 to about 30 base pairs (e.g., at least 17, 18, 19, 20, 21, 22, 23, 24, or 25 base pairs) in length and has a sequence with at least 85% (e.g., 90%, 95%, 99%, or 100%) identity to a sequence that is complementary to a sequence of at least 17 contiguous base pairs within the region of nucleotides 2859 to 2968 shown in FIG. 2 (consensus sequence 1 (SEQ ID NO: 153); e.g., the probe or primer has a sequence with at least 85% (e.g., 90%, 95%, 99%, or 100%) identity to a sequence that is complementary to a sequence of at least 17 contiguous base pairs within one or more of the sequences of SEQ ID NOs: 1-42 that are shown in the alignment in FIG. 2). In yet other embodiments, the endogenous chitin synthase gene probe or primer has a sequence that is complementary to a sequence of at least 17 contiguous base pairs within one or more of SEQ ID NOs: 1-42 that shares at least 70% (more preferably 80%, 85%, 90%, 95%, or 99% or more) sequence identity to the region within nucleotides 2859 to 2968 shown in FIG. 2 (consensus sequence 1; SEQ ID NO: 153) between, e.g., at least 3, 5, 10, 15, or 20 or more fungal species (e.g., up to 50 or more species).

[0067] In several embodiments, the probe or primer that specifically hybridizes to an endogenous 1,3-β-glucan synthase (FKS1) gene is about 17 to about 30 base pairs (e.g., at least 17, 18, 19, 20, 21, 22, 23, 24, or 25 base pairs) in length and has a sequence with at least 85% (e.g., 90%, 95%, 99%, or 100%) identity to a sequence that is complementary to a sequence of at least 17 contiguous base pairs within the region of nucleotides 5360 to 5515 shown in FIG. 5 (consensus sequence 1 (SEQ ID NO: 154); e.g., the probe or primer has a sequence with at least 85% (e.g., 90%, 95%, 99%, or 100%) identity to a sequence that is complementary to a sequence of at least 17 contiguous base pairs within one or more of the sequences of SEQ ID NOs: 65-125 that are shown in the alignment in FIG. 5). In yet other embodiments, the 1,3-β-glucan synthase (FKS1) gene probe or primer has a sequence that is complementary to a sequence of at least 17 contiguous base pairs within one or more of SEQ ID NOs: 65-125 that shares at least 70% (more preferably 80%, 85%, 90%, 95%, or 99% or more) sequence identity to the region within nucleotides 5360 to 5515 shown in FIG. 5 (consensus sequence 2; SEQ ID NO: 154) between, e.g., at least 3, 5, 10, 15, or 20 or more fungal species (e.g., up to 50 or more species).

[0068] The assay of the invention can be used to detect various molds, including but not limited molds from phylum Ascomycota (e.g., Ajellomyces spp., Alternaria spp., Aschersonia spp., Aspergillus spp., Arthroderma spp., Ascochyta spp., Bipolaris spp., Blastomyces spp., Byssochlamys spp., Botryotinia spp., Chaetomium spp., Cladosporium spp., Coccidioides spp., Curvularia spp., Emericella spp., Emmonsia spp., Epicoccum spp., Exophiala spp., Fusarium spp., Geotrichum spp., Gibberella spp., Histoplasma spp., Magnaporthe spp., Metarhizium spp., Monascus spp., Mycospaerella spp., Nectria spp., Neosartorya spp., Neurospora spp., Paecilomyces spp., Paracoccidioides spp., Penicillium spp., Phaeosphaeria spp., Phialemonium spp., Podospora spp., Pyrenophora spp., Sclerotinia spp., Scopulariopsis spp., Sporothrix spp., Stachybotrys spp., Stemphylium spp., Talaromyces spp., Trichophyton spp., Trichothecium spp., Tricoderma spp., Tuber spp., Uncinocarpus spp., or Verticillium spp.), phylum Basidomycota (e.g., Moniliophthora spp., Sporobolomyces spp., Trichosporon spp., Ustilago spp., Cryptococcus spp. or Rhodotorula spp.), phylum Chytridiomycota, phylum Zygomycota (e.g., Absidia spp., Amylomyces spp., Pilaira spp., Rhizomucor spp., Rhizopus spp., or Zygomycetes spp.), and phylum Oomycota in the Stramenopila kingdom.

[0069] The assay of the invention can be used to detect various yeasts, including but not limited yeasts from phylum Ascomycoata (e.g., Candida spp., Clavispora spp., Debaryomyces spp., Dekkera spp., Kluyveromyces spp., Pichia spp., Saccaromyces spp., Torulaspora spp., Vanderwaltozyma spp., Yarrowia spp., or Zygosaccharomyces spp.) and phylum Basidomycota (e.g., Cryptococcus spp. or Rhodotorula spp.).

[0070] In other embodiments, the probes and primers of the invention are directed to one or more regions within a chitin synthase gene or RNA (e.g., chitin synthase class I-VII) and/or one or more regions within a 1,3-β-glucan synthase (FKS1) gene or RNA. Preferably, the probes and primers are directed to one or more regions within a chitin synthase class III gene or RNA. The primers of the invention can be used for PCR amplification, while the probes can be used for detection of, and discrimination between, yeast or mold (or yeast and mold) in a sample.

[0071] Probes and primers directed against chitin synthase genes or RNAs or 1,3-β-glucan synthase (FKS1) genes or RNAs are selected for the following reasons: Firstly, the chitin synthase gene products and the 1,3-β-glucan synthase (FKS1) gene products are clinically relevant, as they are the enzymes responsible for synthesizing chitin and 1,3-β-glucan, respectively, the major cell wall components found in fungi. The enzyme chitin synthase is upregulated in the filamentous pseudohyphae, the structure involved in tissue invasion. Secondly, the chitin synthase and 1,3-β-glucan synthase (FKS1) genes are fungal-specific, having no mammalian, bacterial, or viral counterparts. This is an important point in avoiding false positive amplification of mammalian DNA which will be present in clinical or other samples.

[0072] For example, patients' blood samples contain nucleated cells containing the patients' own DNA and RNA. Thus, this DNA and/or RNA will be co-extracted with fungal DNA and/or RNA during sample preparation for analysis. Consequently, one does not want to amplify a fungal gene that has a mammalian homolog since one cannot separate mammalian DNA from the target fungal DNA.

[0073] The nucleic acid targets for the yeast and mold assay described herein include, e.g., single copy genes, such as a chitin synthase gene (e.g., chitin synthase class III) or 1,3-β-glucan synthase (FKS1) gene. Preferably, the target nucleic acid is fungi-specific or has low homology to nucleic acid molecules (genes or RNAs) from other eukaryotes. In addition, the target nucleic acid should be one that is highly conserved between multiple fungal species (e.g., having at least 70% sequence similarity (or at least 75%, 80%, 85%, 90%, 95%, 97%, 99%, or 100% sequence similarity) between 2 or more fungal species (e.g., at least 3, 5, 10, 15, or 20 or more fungal species, e.g., up to 50 or more species).

[0074] Strategies for identifying fungal-specific single copy genes include, e.g., performing a literature search for fungal single-copy gene targets, sequence BLAST searches, and/or sequence alignments using Geneious bioinformatics software (Biomatters Ltd, Auckland, New Zealand). To avoid false positive results, the nucleic acid probes and primers to be used in the yeast and mold-specific assay of the present invention can be selected from those that are directed to fungal-specific single-copy targets in order to avoid homology to other eukaryotes. Furthermore, the fungal-specific target genes or RNAs preferably have amplifiable regions (e.g., conserved 20-60 base pair regions) for use in amplification techniques. The amplifiable regions are preferably ones that can be used to differentiate between yeasts and molds. The target genes may also include an additional 10-40 base pair region (e.g., a 20 base pair region) within a 100 base pair distance downstream from the amplifiable region that can be used to design a complementary sequence referred to as a blocker. As is discussed below, the blocker can be used in a TMA/RTMA-based assay to reduce the amount of non-target nucleic acid molecules present in a sample.

[0075] Preferably, the yeast/mold assay is based on a nucleic acid amplification reaction, but other assays that do not amplify the target nucleic acid molecules (i.e., direct detection) can also be used. These assays include, e.g., immunoassays, bio-sensor assays, immunostaining-microscopy-based assays, nucleic acid-array-based assays, DNA chip-based assays, bacteriophage-detection-based assays, classical microbiology-based assays, and chemical or biochemical assays based on the detection of compounds associated with particular target organisms or groups of target organisms, and combinations thereof.

[0076] In other embodiments, the yeast/mold assay is performed using a liquid-based assay or using a solid-support based assay (see, e.g., U.S. Pat. No. 7,745,119).

### Useful Probe Labeling Systems and Detectable Moieties

[0077] Preferred detectable labels for probes in accordance with the present invention are detectable in homogeneous assay systems (i.e., where, in a mixture, bound labeled probe exhibits a detectable change, such as stability or differential degradation, compared to unbound labeled probe).

[0078] Essentially any labeling and detection system that can be used for monitoring specific nucleic acid hybridization can be used in conjunction with the present invention. Included among the collection of useful labels are fluorescent moieties (either alone or in combination with “quencher” moieties), chemiluminescent molecules, and redox-active moieties that are amenable to electronic detection methods. In some embodiments, preferred fluorescent labels include non-covalently binding labels (e.g., intercalating dyes) such as ethidium bromide, propidium bromide, chromomycin, acridine orange, and the like. In other embodiments, the use of covalently bound fluorescent agents is preferred. Preferred chemiluminescent molecules include acridinium esters. Examples of these detectable labels have been disclosed by Arnold et al., in U.S. Pat. No. 5,283,174 for use in connection with homogenous protection assays. Preferred electronic labeling and detection approaches are disclosed in U.S. Pat. Nos. 5,591,578 and 5,770,369, and the published international patent application WO 98/57158. Redox active moieties useful as labels in the present invention include transition metals, such as Cd, Mg, Cu, Co, Pd, Zn, Fe, and Ru.

[0079] In some applications, probes exhibiting at least some degree of self-complementarity are desirable to facilitate detection of probe:target duplexes in a test sample without first requiring the removal of unhybridized probe prior to detection. By way of example, structures referred to as “molecular torches” and “molecular beacons” are designed to include distinct regions of self-complementarity and regions of target-complementarity. Molecular torches are fully described in U.S. Pat. Nos. 6,849,412, 6,835,542, 6,534,274, and 6,361,945, and molecular beacons are fully described in U.S. Pat. Nos. 5,118,801, 5,312,728, and 5,925,517. Both of these self-reporting probes include a label pair that interacts when the probe is in a closed conformation in the absence of any hybridized target. Hybridization of the target nucleic acid and the target complementary sequence separates the self-complementary portions of the probes, thereby shifting the probes to an open conformation. The shift to the open conformation is detectable due to reduced interaction of the label pair, which may be, for example, a fluorophore and a quencher (e.g., DABCYL and EDANS). Examples of other forms of labeled probes are disclosed in, e.g., U.S. Pat. Nos. 5,118,801, 5,312,728, and 6,150,097, and U.S. Pub. Nos. 2006-0068417 A1 and 2006-0194240 A1.

[0080] In preferred embodiments that detect an amplified product near or at the end of an amplification step, the molecular torch, as a linear probe, hybridizes to the amplified product to provide a signal that indicates hybridization of the probe to the amplified sequence. In preferred embodiments that use real-time detection, the probe is preferably a hairpin structure probe that includes a reporter moiety that provides the detected signal when the probe binds to the amplified product. For example, a hairpin probe may include a reporter moiety or label, such as a fluorophore (“F”), attached to one end of the probe and an interacting compound, such as quencher (“Q”), attached to the other end the hairpin structure to inhibit signal production when the hairpin structure is in the “closed” conformation and not hybridized to the amplified product, whereas a detectable signal results when the probe is hybridized to a complementary sequence in the amplified product, thus converting the probe to a “open” conformation.

[0081] Molecular torches, molecular beacons and the like preferably are individually labeled with an interactive pair of detectable labels. Examples of detectable labels that are preferred as members of an interactive pair of labels interact with each other by FRET or non-FRET energy transfer mechanisms. Fluorescence resonance energy transfer (FRET) involves the radiationless transmission of energy quanta from the site of absorption to the site of its utilization in the molecule, or system of molecules, by resonance interaction between chromophores, over distances considerably greater than interatomic distances, without conversion to thermal energy, and without the donor and acceptor coming into kinetic collision. The “donor” is the moiety that initially absorbs the energy, and the “acceptor” is the moiety to which the energy is subsequently transferred. In addition to FRET, there are at least three other “non-FRET” energy transfer processes by which excitation energy can be transferred from a donor to an acceptor molecule.

[0082] Examples of donor/acceptor label pairs that may be used in connection with the invention, making no attempt to distinguish FRET from non-FRET pairs, include fluorescein/tetramethylrhodamine, IAEDANS/fluorescein, EDANS/DABCYL, coumarin/DABCYL, fluorescein/fluorescein, BODIPY FL/BODIPY FL, fluorescein/DABCYL, lucifer yellow/DABCYL, BODIPY/DABCYL, eosin/DABCYL, erythrosine/DABCYL, tetramethylrhodamine/DABCYL, Texas Red/DAB CYL, CY5/BH1, CY5/BH2, CY3/BH1, CY3/BH2 and fluorescein/QSY7 dye. Those having an ordinary level of skill in the art will understand that when donor and acceptor dyes are different, energy transfer can be detected by the appearance of sensitized fluorescence of the acceptor or by quenching of donor fluorescence. When the donor and acceptor species are the same, energy can be detected by the resulting fluorescence depolarization. Non-fluorescent acceptors such as DABCYL and the QSY 7 dyes advantageously eliminate the potential problem of background fluorescence resulting from direct (i.e., non-sensitized) acceptor excitation. Preferred fluorophore moieties that can be used as one member of a donor-acceptor pair include fluorescein, ROX, TAMARA, and the CY dyes (such as CY5). Highly preferred quencher moieties that can be used as another member of a donor-acceptor pair include DABCYL and the BLACK HOLE QUENCHER moieties which are available from Biosearch Technologies, Inc., (Novato, Calif.).

[0083] Certain amplicon monitoring procedures most commonly used in connection with PCR-based methods rely on the use of DNA binding dyes or probes which can be digested by a nuclease activity. In the first instance, the amount of analyte amplicon present in a reaction preferably is monitored using fluorescent double-stranded DNA recognizing compounds. This is possible because the amount of double-stranded amplification product usually exceeds the amount of nucleic acid originally present in the sample to be analyzed. Double-stranded DNA specific dyes may be used in these monitoring procedures so that, upon excitation with an appropriate wavelength of light, enhanced fluorescence results only if the dye is bound to double-stranded DNA. Preferably, only those dyes are used which, like SYBR Green I (Molecular Probes/Invitrogen Corporation; CA), do not affect the efficiency of the PCR reaction. In an alternative procedure, the amplification product is detected using a single-stranded hybridization probe which is labeled with a fluorescent entity. The fluorescence emission of this entity is quenched by a second label which is present on the same probe, and which acts as a quenching compound. During the annealing step of the PCR reaction, the probe hybridizes to its target sequence, and, subsequently, during the extension of the primer, the DNA polymerase having a 5′-3′-exonuclease activity digests the hybridization probe such that the fluorescent entity is separated from the quencher compound. After appropriate excitation, fluorescence emission can be monitored as an indicator of accumulating amplification product.

[0084] Synthetic techniques and methods of bonding labels to nucleic acids and detecting labels are well known in the art (e.g., see Sambrook et al., Molecular Cloning, A Laboratory Manual, 2nd ed. (Cold Spring Harbor Laboratory Press, Cold Spring Harbor, N.Y., 1989), Chapter 10; Nelson et al., U.S. Pat. No. 5,658,737; Woodhead et al., U.S. Pat. No. 5,656,207; Hogan et al., U.S. Pat. No. 5,547,842; Arnold et al., U.S. Pat. No. 5,283,174; Kourilsky et al., U.S. Pat. No. 4,581,333), and Becker et al., European Patent App. No. 0 747 706.

### Yeast/Mold Assay

[0085] The present invention provides a method for detecting and distinguishing between yeast and/or mold using a hybridization assay that may also include a nucleic amplification step that precedes a hybridization step. Preparation of samples for amplification of yeast and/or mold sequences may include separating and/or concentrating organisms contained in a sample from other sample components, e.g., filtration of particulate matter from air, water, or other types of samples. Once separated or concentrated, the target nucleic acid may be obtained from any medium of interest, for example, a liquid sample of medical, veterinary, environmental, or industrial significance. Sample preparation may also include chemical, mechanical, and/or enzymatic disruption of cells to release intracellular contents, including yeast and/or mold RNA or DNA. Preferred samples are food and environmental samples.

[0086] Sample preparation may include a step of target capture to specifically or non-specifically separate the target nucleic acids from other sample components. Nonspecific target preparation methods may selectively precipitate nucleic acids from a substantially aqueous mixture, adhere nucleic acids to a support that is washed to remove other sample components, or use other means to physically separate nucleic acids, including yeast and/or mold nucleic acid, from a mixture that contains other components. Other nonspecific target preparation methods may selectively separate RNA from DNA in a sample.

[0087] The target nucleic acid may also be the product of a nucleic acid amplification assay, such as PCR or ligase chain reaction (LCR). If the target nucleic acid is principally double stranded, it will be treated to denature it prior to the hybridization assay. Denaturation of nucleic acids is preferably accomplished by heating in boiling water or alkali treatment (e.g., 0.1 N sodium hydroxide), which, if desired, can simultaneously be used to lyse cells. Also, release of nucleic acids from cellular sources can, for example, be obtained by mechanical disruption (freeze/thaw, abrasion, sonication, bead beating), physical/chemical disruption (detergents such as TRITON™, Tween, or sodium dodecyl sulfate, alkali treatment, osmotic shock, or heat), or enzymatic lysis (lysozyme, proteinase K, pepsin). The resulting test medium will contain the target nucleic acid in single-stranded form.

[0088] Reaction mixtures for amplifying the target nucleic acids may include one or more of target capture reagents, blocker nucleic acid molecules, lysis reagents, and amplification reagents. All or some of the oligomer compositions may be present in one or more of such reaction mixtures. The methods may include performing a nucleic acid amplification of fungal sequences (e.g., chitin synthase (mold only) or 1,3-β-glucan synthase (FKS1) (yeast and mold) gene or RNA sequences). Amplified nucleic acids are then useful for a variety of subsequent analytical methods, including, but not limited to nucleic acid detection, for example by specifically hybridizing the amplified product with a nucleic acid probe that provides a signal to indicate the presence of a mold or yeast in the sample. The amplification step includes contacting the sample with one or more amplification oligomers specific for a target sequence in, e.g., a chitin synthase gene or RNA (e.g., a chitin synthase class III gene or RNA) or a 1,3-β-glucan synthase (FKS1) gene or RNA to produce an amplified product if a fungal nucleic acid is present in the sample. Amplification synthesizes additional copies of the target sequence or its complement by using at least one nucleic acid polymerase to extend the sequence from an amplification oligomer (a primer) using a template strand. One embodiment for detecting the amplified product uses a hybridizing step that includes contacting the amplified product with at least one probe specific for a sequence amplified by the selected amplification oligomers, e.g., a sequence contained in the target sequence flanked by a pair of selected primers (e.g., a target sequence present within a chitin synthase gene or RNA, such as a chitin synthase class III gene or RNA, or a 1,3-β-glucan synthase (FKS1) gene or RNA).

[0089] Amplification methods known in the art include, for example, replicase-mediated amplification, polymerase chain reaction (PCR), ligase chain reaction (LCR), strand-displacement amplification (SDA), and transcription-mediated or transcription-associated amplification (see, e.g., U.S. Pat. No. 6,872,816). Replicase-mediated amplification uses self-replicating RNA molecules, and a replicase such as QB-replicase (see, e.g., U.S. Pat. No. 4,786,600). PCR amplification uses a DNA polymerase, pairs of primers, and thermal cycling to synthesize multiple copies of two complementary strands of dsDNA or from a cDNA (see, e.g., U.S. Pat. Nos. 4,683,195; 4,683,202; and 4,800,159). LCR amplification uses four or more different oligonucleotides to amplify a target and its complementary strand by using multiple cycles of hybridization, ligation, and denaturation (see, e.g., U.S. Pat. Nos. 5,427,930 and 5,516,663). SDA uses a primer that contains a recognition site for a restriction endonuclease and an endonuclease that nicks one strand of a hemimodified DNA duplex that includes the target sequence, whereby amplification occurs in a series of primer extension and strand displacement steps (see, e.g., U.S. Pat. Nos. 5,422,252; 5,547,861; and 5,648,211). Those skilled in the art will know how to provide suitable conditions for performing these amplification reactions.

[0090] The target nucleic acid of one or more fungal species (e.g., mold and/or yeast) can also be amplified by a transcription-based amplification technique. One transcription-based amplification system is transcription-mediated amplification (TMA), which employs an RNA polymerase to produce multiple RNA transcripts of a target region. Exemplary TMA amplification methods are described in, e.g., U.S. Pat. Nos. 4,868,105; 5,124,246; 5,130,238; 5,399,491; 5,437,990; 5,480,784; 5,554,516; and 7,374,885; and PCT Pub. Nos. WO 88/01302; WO 88/10315 and WO 95/03430.

[0091] The methods of the present invention may include a TMA reaction that involves the use of a single primer TMA reaction, as is described in U.S. Pat. No. 7,374,885. In general, the single-primer TMA methods use a primer oligomer (e.g., a NT7 primer), a modified promoter-based oligomer (or “promoter-provider oligomer”; e.g., a T7 provider) that is modified to prevent the initiation of DNA synthesis from its 3′ end (e.g., by including a 3′-blocking moiety) and, optionally, a blocker oligomer (e.g., a blocker) to terminate elongation of a cDNA from the target strand (see, e.g., FIG. 2). Promoter-based oligomers provide an oligonucleotide sequence that is recognized by an RNA polymerase. This single primer TMA method synthesizes multiple copies of a target sequence and includes the steps of treating a target RNA that contains a target sequence with a priming oligomer and a binding molecule, where the primer hybridizes to the 3′ end of the target strand. RT initiates primer extension from the 3′ end of the primer to produce a cDNA which is in a duplex with the target strand (e.g., RNA:cDNA). When a blocker oligomer, is used in the reaction, it binds to the target nucleic acid adjacent near the user designated 5′ end of the target sequence. When the primer is extended by DNA polymerase activity of RT to produce cDNA, the 3′ end of the cDNA is determined by the position of the blocker oligomer because polymerization stops when the primer extension product reaches the binding molecule bound to the target strand. Thus, the 3′ end of the cDNA is complementary to the 5′ end of the target sequence. The RNA:cDNA duplex is separated when RNase (e.g., RNase H of RT) degrades the RNA strand, although those skilled in the art will appreciate that any form of strand separation may be used. Then, the promoter-provider oligomer hybridizes to the cDNA near the 3′ end of the cDNA strand.

[0092] The promoter-provider oligomer includes a 5′ promoter sequence for an RNA polymerase and a 3′ target hybridizing region complementary to a sequence in the 3′ region of the cDNA. The promoter-provider oligomer also has a modified 3′ end that includes a blocking moiety that prevents initiation of DNA synthesis from the 3′ end of the promoter-provider oligomer. In the promoter-provider:cDNA duplex, the 3′-end of the cDNA is extended by DNA polymerase activity of RT using the promoter oligomer as a template to add a promoter sequence to the cDNA and create a functional double-stranded promoter.

[0093] An RNA polymerase specific for the promoter sequence then binds to the functional promoter and transcribes multiple RNA transcripts complementary to the cDNA and substantially identical to the target region sequence that was amplified from the initial target strand. The resulting amplified RNA can then cycle through the process again by binding the primer and serving as a template for further cDNA production, ultimately producing many amplicons from the initial target nucleic acid present in the sample. Some embodiments of the single-primer transcription-associated amplification method do not include the blocking oligomer and, therefore, the cDNA product made from the primer has an indeterminate 3′ end, but the amplification steps proceed substantially as described above for all other steps.

[0094] The methods of the invention may also utilize a reverse transcription-mediated amplification (RTMA), various aspects of which are disclosed in, e.g., U.S. Pat. Pub. No. US 2006-0046265 A1. RTMA is an RNA transcription-mediated amplification system using two enzymes to drive the reaction: RNA polymerase and reverse transcriptase. RTMA is isothermal; the entire reaction is performed at the same temperature in a water bath or heat block. This is in contrast to other amplification reactions such as PCR that require a thermal cycler instrument to rapidly change the temperature to drive reaction. RTMA can amplify either DNA or RNA, and can produce either DNA or RNA amplicons, in contrast to most other nucleic acid amplification methods that only produce DNA. RTMA has very rapid kinetics, resulting in a billion-fold amplification within 15-60 minutes. RTMA can be combined with a Hybridization Protection Assay (HPA), which uses a specific oligonucleotide probe labeled with an acridinium ester detector molecule that emits a chemiluminescent signal, for endpoint detection or with molecular torches for real-time detection. There are no wash steps, and no amplicon is ever transferred out of the tube, which simplifies the procedure and reduces the potential for contamination. Thus, the advantages of RTMA include amplification of multiple targets, results can be qualitative or quantitative, no transfers and no wash steps necessary, and detection can be in real time using molecular torches.

[0095] As an illustrative embodiment, the RTMA reaction is initiated by treating an RNA target sequence in a nucleic acid sample with both a tagged amplification oligomer and, optionally a blocking oligomer (see, e.g., FIG. 8). The tagged amplification oligomer includes a target hybridizing region that hybridizes to a 3′-end of the target sequence and a tag region situated 5′ to the target hybridizing region. The blocking oligomer hybridizes to a target nucleic acid containing the target sequence in the vicinity of the 5′-end of the target sequence. Thus, the target nucleic acid forms a stable complex with the tagged amplification oligomer at the 3′-end of the target sequence and the terminating oligonucleotide located adjacent to or near the determined 5′-end of the target sequence prior to initiating a primer extension reaction. Unhybridized tagged amplification oligomers are then made unavailable for hybridization to a target sequence prior to initiating a primer extension reaction with the tagged priming oligonucleotide, preferably by inactivating and/or removing the unhybridized tagged priming oligonucleotide from the nucleic acid sample. Unhybridized tagged amplification oligomer that has been inactivated or removed from the system is then unavailable for unwanted hybridization to contaminating nucleic acids. In one example of removing unhybridized tagged amplification oligomer from a reaction mixture, the tagged amplification oligomer is hybridized to the target nucleic acid, and the tagged amplification oligomer:target nucleic acid complex is removed from the unhybridized tagged amplification oligomer using a wash step. In this example, the tagged amplification oligomer:target nucleic acid complex may be further complexed to a target capture oligomer and a solid support. In one example of inactivating the unhybridized tagged amplification oligomer, the tagged amplification oligomers further comprise a target-closing region. In this example, the target hybridizing region of the tagged amplification oligomer hybridizes to target nucleic acid under a first set of conditions (e.g., stringency). Following the formation of the tagged amplification oligomer:target nucleic acid complex the unhybridized tagged amplification oligomer is inactivated under a second set of the conditions, thereby hybridizing the target closing region to the target hybridizing region of the unhybridized tagged amplification oligomer. The inactivated tagged amplification oligomer is then unavailable for hybridizing to contaminating nucleic acids. A wash step may also be included to remove the inactivated tagged amplification oligomers from the assay.

[0096] An extension reaction is then initiated from the 3′-end of the tagged amplification oligomer with a DNA polymerase, e.g., reverse transcriptase, to produce an initial amplification product that includes the tag sequence. The initial amplification product is then separated from the target sequence using an enzyme that selectively degrades the target sequence (e.g., RNAse H activity). Next, the initial amplification product is treated with a promoter-based oligomer having a target hybridizing region and an RNA polymerase promoter region situated 5′ to the target hybridizing region, thereby forming a promoter-based oligomer:initial amplification product hybrid. The promoter-based oligomer may be modified to prevent the initiation of DNA synthesis, preferably by situating a blocking moiety at the 3′-end of the promoter-based oligomer (e.g., nucleotide sequence having a 3′-to-5′ orientation). The 3′-end of the initial amplification product is then extended to add a sequence complementary to the promoter, resulting in the formation of a double-stranded promoter sequence. Multiple copies of a RNA product complementary to at least a portion of the initial amplification product are then transcribed using an RNA polymerase, which recognizes the double-stranded promoter and initiates transcription therefrom. As a result, the nucleotide sequence of the RNA product is substantially identical to the nucleotide sequence of the target nucleic acid and to the complement of the nucleotide sequence of the tag sequence.

[0097] The RNA products may then be treated with a tag-targeting oligomer, which hybridizes to the complement of the tag sequence to form a tag-targeting oligomer: RNA product hybrid, and the 3′-end of the tag-targeting oligomer is extended with the DNA polymerase to produce an amplification product complementary to the RNA product. The DNA strand of this amplification product is then separated from the RNA strand of this amplification product using an enzyme that selectively degrades the first RNA product (e.g., RNAse H activity). The DNA strand of the amplification product is treated with the promoter-based oligomer, which hybridizes to the 3′-end of the second DNA primer extension product to form a promoter-based oligomer:amplification product hybrid. The promoter-based oligomer:amplification product hybrid then re-enters the amplification cycle, where transcription is initiated from the double-stranded promoter and the cycle continues, thereby providing amplification product of the target sequence.

[0098] Amplification product can then be used in a subsequent assay. One subsequent assay includes nucleic acid detection, preferably nucleic acid probe-based nucleic acid detection. The detection step may be performed using any of a variety of known ways to detect a signal specifically associated with the amplified target sequence, such as by hybridizing the amplification product with a labeled probe and detecting a signal resulting from the labeled probe. The detection step may also provide additional information on the amplified sequence, such as all or a portion of its nucleic acid base sequence. Detection may be performed after the amplification reaction is completed, or may be performed simultaneous with amplifying the target region, e.g., in real time. In one embodiment, the detection step allows detection of the hybridized probe without removal of unhybridized probe from the mixture (see, e.g., U.S. Pat. Nos. 5,639,604 and 5,283,174).

[0099] In embodiments that detect the amplified product near or at the end of the amplification step, a linear probe may be used to provide a signal to indicate hybridization of the probe to the amplified product. One example of such detection uses a probe that is labeled with a luminescent marker. The luminescent label may be hydrolyzed from non-hybridized probe. Detection is performed by chemiluminescence using a luminometer (see, e.g., WO 89/002476).

[0100] In other embodiments that use real-time detection, the probe may be a hairpin probe, such as a molecular beacon, molecular torch, or hybridization switch probe that is labeled with a reporter moiety that is detected when the probe binds to amplified product. Such probes may contain target binding sequences and non-target binding sequences. Various forms of such probes have been described previously (see, e.g., U.S. Pat. Nos. 5,118,801; 5,312,728; 5,925,517; 6,150,097; 6,849,412; 6,835,542; 6,534,274; and 6,361,945; and U.S. Pat. Pub. Nos. 2006-0068417A1 and 2006-0194240A1).

[0101] The nucleic acid probe used to detect the target nucleic acid may be a DNA probe, an RNA probe, or a peptide nucleic acid (PNA) probe. The nucleic acid probe will have at least one single-stranded base sequence substantially complementary to at least part of the target nucleic acid sequence. However, such base sequence need not be a single continuous polynucleotide segment, but can be comprised of two or more individual segments interrupted by non-complementary sequences. These non-hybridizable sequences, if present, are linear. In addition, the complementary region of the nucleic acid probe can be flanked at the 3′- and 5′-termini by non-hybridizable sequences, such as those comprising the DNA or RNA of a vector into which the complementary sequence had been inserted for propagation. In either instance, the nucleic acid probe as presented as an analytical reagent will exhibit detectable hybridization at one or more points with target nucleic acids of interest. The nucleic acid probe sequence can be of any convenient or desired length, ranging from as few as a dozen to as many as 10,000 bases, and including oligonucleotides having less than about 50 bases (e.g., between 20 and 50 bases). The nucleic acid probe may be an oligonucleotide produced by solid-phase chemistry by a nucleic acid synthesizer. The RNA or DNA probe can be obtained in a variety of other conventional manners. It should be understood that in using the expressions RNA probe and DNA probe herein, it is not implied that all nucleotides comprised in the probe be ribonucleotides or 2′-deoxyribonucleotides. Therefore, one or more of the 2′-positions on the nucleotides comprised in the probe can be chemically modified, if desired, and provided there is no substantial interference with the hybridization assay. Likewise, in addition or alternatively to such limited 2′-deoxy modification, the nucleic acid probe can have in general any other modification along its ribose phosphate backbone provided there is no substantial interference with the hybridization assay.

[0102] In an embodiment, the nucleic acid probe may be labeled with an enzyme or other molecule that can be used to detect the nucleic acid molecule. In addition to the enzyme label, the nucleic acid probe may be labeled with either a detectable moiety or an immobilizable moiety. For example, the nucleic acid probe may be prepared by solid-phase chemistry using a nucleic acid synthesizer and may have a trityl-hexyl thiol derivatized 5′-end. The covalent attachment of the label to this moiety may be achieved by a number of well-known methods using a wide range of heterobifunctional reagents. For example, the method of Carlsson et al. (Biochem J. 173:723-737, 1978) may be used: the label is reacted with 3-[(2)-pyridyldithio]propionic acid N-hydroxysuccinimide ester (SPDP) to give a 2-pyridyl disulphide-activated label. This allows disulfide exchange with trityl-hexyl thiol derivatized described above to yield a labeled nucleic acid probe. Other approaches for labeling the nucleic acid probe will be apparent to one skilled in the art. Additionally, a wide range of labeled nucleic acids is available from commercial sources. Preferred labels include the enzymes alkaline phosphatase, peroxidase, β-galactosidase, nuclease P₁ and nuclease S₁; and the haptens digoxin, digoxygenin, fluorescein, fluorescein isothiocyanate, and biotin or biotin analogues.

[0103] Reverse Transcription Primers for Use in the Yeast/Mold Assay

[0104] Reverse Transcription primers for use in methods of amplifying Chitin Synthase class III genes or RNAs in the yeast/mold assay of the present invention include a non-T7 (NT7) primer having a length of between 10 and 30 nucleotides (e.g., 17 nucleotides) and having a sequence that is complementary to, and specific for, a sequence with at least 70% sequence identity (e.g., at least 80%, 85%, 90%, 95%, 97%, 99%, or 100% sequence identity) to the region corresponding to at least nucleotides 2865-2881 of one or more of SEQ ID NOs: 1-42 and 153. In a preferred embodiment, the NT7 primer has a sequence that is complementary to, and specific for, a sequence with at least 70% sequence identity (e.g., at least 80%, 85%, 90%, 95%, 97%, 99%, or 100% sequence identity) to the NT7 primer sequence shown in FIG. 9. More preferably the sequence is complementary to the NT7 primer shown in FIG. 9.

[0105] Reverse Transcription primers for use in methods of amplifying 1,3-β-glucan synthase (FKS1) genes or RNAs in the yeast/mold assay of the present invention include a primer having a length of between 10 and 27 nucleotides (e.g., 24 nucleotides) and having a sequence that is complementary to, and specific for, a sequence with at least 70% sequence identity (e.g., at least 80%, 85%, 90%, 95%, 97%, 99%, or 100% sequence identity) to the region corresponding to at least nucleotides 5361-5383 of one or more of SEQ ID NOs: 65-125 and 154.

[0106] Torch Oligomers for Use in the Yeast/Mold Assay

[0107] Torch oligomers for use in detecting amplified Chitin Synthase class III genes or RNAs in the yeast/mold assay of the present invention include oligos having lengths of between 10 and 27 nucleotides (e.g., 22 nucleotides) and having sequences that are complementary to, and specific for, sequences with at least 70% sequence identity (e.g., at least 80%, 85%, 90%, 95%, 97%, 99%, or 100% sequence identity) to the region corresponding to at least nucleotides 2907-2928 of one or more of SEQ ID NOs: 1-42 and 153. In a preferred embodiment, the Torch oligomer has a sequence that is complementary to, and specific for, a sequence with at least 70% sequence identity (e.g., at least 80%, 85%, 90%, 95%, 97%, 99%, or 100% sequence identity) to the torch oligomer sequence shown in FIG. 9. More preferably the sequence is complementary to the torch oligomer shown in FIG. 9.

[0108] Torch oligomers for use in detecting amplified 1,3-β-glucan synthase (FKS1) genes or RNAs in the yeast/mold assay of the present invention include an oligo having a length of between 10 and 30 nucleotides (e.g., 26 nucleotides) and having a sequence that is complementary to, and specific for, a sequence with at least 70% sequence identity (e.g., at least 80%, 85%, 90%, 95%, 97%, 99%, or 100% sequence identity) to the region corresponding to at least nucleotides 5409-5433 of one or more of SEQ ID NOs: 65-125 and 154.

[0109] T7 Provider Oligomers for Use in the Yeast/Mold Assay

[0110] T7 provider oligomers for use in amplifying Chitin Synthase class III genes or RNAs in the yeast/mold assay of the present invention include a T7 provider oligo having a length of between 10 and 25 nucleotides (e.g., 21 nucleotides) and having a sequence that is complementary to, and specific for, a sequence with at least 80% sequence identity to the region corresponding to at least nucleotides 2930-2950 of one or more of SEQ ID NOs: 1-42 and 153 in addition to a T7 promoter sequence. In a preferred embodiment, the T7 provider oligomer has a sequence that is complementary to, and specific for, a sequence with at least 70% sequence identity (e.g., at least 80%, 85%, 90%, 95%, 97%, 99%, or 100% sequence identity) to the T7 provider oligomer sequence shown in FIG. 9. More preferably the sequence is complementary to the T7 provider oligomer shown in FIG. 9.

[0111] T7 provider oligomers for use in amplifying 1,3-β-glucan synthase (FKS1) genes or RNAs in the yeast/mold assay of the present invention include an oligo having a length of between 10 and 32 nucleotides (e.g., 27 nucleotides) and having a sequence that is complementary to, and specific for, a sequence with at least 70% sequence identity (e.g., at least 80%, 85%, 90%, 95%, 97%, 99%, or 100% sequence identity) to the region corresponding to at least nucleotides 5435-5457 of one or more of SEQ ID NOs: 65-125 and 154.

[0112] Blocker Oligomers for Use in the Yeast/Mold Assay

[0113] Blocker oligomers for use in methods of amplifying Chitin Synthase class III genes or RNAs in the yeast/mold assay of the present invention include oligos having lengths of between 10 and 24 nucleotides (e.g., 18 nucleotides) and having sequences that are complementary to, and specific for, sequences with at least 70% sequence identity (e.g., at least 80%, 85%, 90%, 95%, 97%, 99%, or 100% sequence identity) to the region corresponding to nucleotides 2942-2959 of one or more of SEQ ID NOs: 1-42 and 153 and are optionally modified (e.g., a methoxy modification, such as at the 2′ position of ribose or at the 3′ end of the oligo; or a locked nucleic acid (LNA) modification, such as T or A having a methylene bridge connecting the 2′-O atom and the 4′-C atom of ribose) to either bind RNA or DNA specifically. In a preferred embodiment, the blocker oligomer has a sequence that is complementary to, and specific for, a sequence with at least 70% sequence identity (e.g., at least 80%, 85%, 90%, 95%, 97%, 99%, or 100% sequence identity) to the blocker oligomer sequence shown in FIG. 9. More preferably the sequence is complementary to the blocker oligomer shown in FIG. 9.

[0114] Blocker oligomers for use in methods of amplifying 1,3-β-glucan synthase (FKS1) genes or RNAs in the yeast/mold assay of the present invention include an oligo having a length of between 10 and 24 nucleotides (e.g., 20 nucleotides) and having a sequence that is complementary to, and specific for, a sequence with at least 70% sequence identity (e.g., at least 80%, 85%, 90%, 95%, 97%, 99%, or 100% sequence identity) to the region corresponding to at least nucleotides 5496-5514 of one or more of SEQ ID NOs: 65-125 and 154.

[0115] Displacer Oligomers for Use in the Yeast/Mold Assay

[0116] Displacer oligomers for use in methods of amplifying DNA (e.g., Chitin Synthase class III genes) in the yeast/mold assay of the present invention include oligos having lengths of between 10 and 24 nucleotides (e.g., 20 nucleotides) and having sequences that are complementary to, and specific for, sequences with at least 70% sequence identity (e.g., at least 80%, 85%, 90%, 95%, 97%, 99%, or 100% sequence identity) to the region corresponding to nucleotides upstream from nucleotide 2864 of one or more of SEQ ID NOs: 1-42 and 153 (e.g., sequences of between 10-24 nucleotides (e.g., 20 nucleotides) within the region of nucleotides 2750-2864 of SEQ ID NOs: 1-42 and 153). In a preferred embodiment, the displacer oligomer has a sequence that is complementary to, and specific for, a sequence with at least 70% sequence identity (e.g., at least 80%, 85%, 90%, 95%, 97%, 99%, or 100% sequence identity) to the displacer oligomer sequence shown in FIG. 9. More preferably the sequence is complementary to the displacer oligomer shown in FIG. 9.

[0117] Displacer oligomers for use in methods of amplifying 1,3-β-glucan synthase (FKS1) genes or RNAs in the yeast/mold assay of the present invention include an oligo having a length of between 10 and 24 nucleotides (e.g., 20 nucleotides) and having a sequence that is complementary to, and specific for, a sequence with at least 70% sequence identity (e.g., at least 80%, 85%, 90%, 95%, 97%, 99%, or 100% sequence identity) to the region corresponding to nucleotides upstream from nucleotide 5360 of one or more of SEQ ID NOs: 65-125 and 154 (e.g., sequences of between 10-24 nucleotides (e.g., 20 nucleotides) within the region of nucleotides 5250-5360 of SEQ ID NOs: 65-125 and 154).

### Application of the Yeast/Mold Assay to Clinical Samples

[0118] The yeast/mold assay of the invention can also be applied to clinical diagnostic purposes. In this embodiment, blood is collected from a patient and centrifuged in order to separate the blood into 3 layers (i.e., the red blood cells, the buffy coat, and the plasma). The plasma and the buffy coat layer are then collected and treated with a detergent. The resulting product is then treated with, for example, an enzyme, such as DNase I, in order to digest any non-fungal DNA which may be present. The chitin cell wall of the fungi is then digested, using Zymolase, for example, in order to release the fungal DNA for analysis. The DNA is then freed from bound protein by using, for example, Proteinase K digestion followed by detergent treatment. The DNA is then extracted by using phenol, for example, and then precipitated by using a chemical such as ethanol, for example. Subsequently, the DNA pellet is resuspended in distilled water. One is then ready to analyze the sample using the primers.

[0119] The extracted DNA can be analyzed by one or more amplification methods known in the art and described herein, including, for example, replicase-mediated amplification, PCR, LCR, SDA, and RTMA, and one or more of the mold and/or yeast/mold-specific primers and oligos described herein (see, e.g., FIGS. 2 and 5, respectively).

[0120] After the DNA-fungal-specific product is made, it may then be analyzed using either a liquid assay or a solid support-based assay (e.g., an agarose gel). A negative control (e.g., no DNA is added to one set of control tubes, so no DNA product should be made) and/or a positive control can be run, if desired.

### Application of the Yeast/Mold Assay to Industrial Samples

[0121] The methods disclosed herein can also be used to detect yeast or mold present in industrial processes, such as pharmaceutical manufacturing, transportation fuel manufacturing (e.g., fuel ethanol manufacturing and hydrocarbon fuels), fermentation systems, and industrial processes requiring water-cooling towers, as well as in industrial reagents, fluids (e.g., metal working fluids and water-based coolants), lubricants, holding tanks, or other liquid or solid components, and products, e.g., petroleum products. Fungal contaminants present in industrial processes and reagents can cause obstruction of fluid delivery lines or chemical deterioration in machinery that result in dangerous situations, as well as poor performance and costly repairs. In addition, fungal growth in industrial systems can be responsible for corrosion, slime formation, foul odors, and decreases in fluid function.

[0122] The primers and oligos described herein can be used to detect target polynucleotides that are associated with yeast and/or mold present in a sample from an industrial process or product. The methods of the invention may be used to detect genes or RNAs, such as chitin synthase (e.g., chitin synthase class III) or 1,3-β-glucan synthase (FKS1) genes or RNAs, associated with the yeast and/or mold disclosed herein.

### Application of the Yeast/Mold Assay to Water-Based Samples

[0123] The methods disclosed herein can also be used to provide a rapid and sensitive diagnostic test for the presence and enumeration of yeast and/or mold in any water sample, including, but not limited to, swimming pools, aquatic parks, wells, home drinking water, reservoirs, beaches, lakes, oceans, fish and shellfish farms, agricultural water, dialysis water, medication reconstitution water, water treatment facilities, cruise ships, and bottled water.

[0124] The primers and oligos described herein can be used to detect target polynucleotides that are associated with yeast and/or mold present in a water-based sample. The methods of the invention may be used to detect genes or RNAs, such as chitin synthase (e.g., chitin synthase class III) or 1,3-β-glucan synthase (FKS1) genes or RNAs, associated with the yeasts and/or molds disclosed herein.

### Application of the Yeast/Mold Assay to Food and Environmental Samples

[0125] Yeast and/or mold present in food and/or environmental samples may be detected by the methods of the present invention. Food samples include liquid and solid food, such as beef, pork, sheep, bison, deer, elk, poultry, fish, produce, dairy products, dry goods, ready-made food products, raw and processed foods, and feed products, and ingredients, such as dairy items, vegetables, meat and meat by-products, and waste. Environmental samples include but are not limited to, e.g., environmental material, such as surface matter, soil, sludge, samples taken by impingers and filtration, processing instruments, apparatus, equipment, utensils, disposable and non-disposable items, and materials present in and on buildings and in hospital settings, including, e.g., building and other materials, such as the paper on gypsum wallboard (drywall), ceiling tiles, wood products, paint, wallpaper, carpeting, ventilation systems (e.g., system components, such as filters, insulation, ductwork, and coils/fins), some furnishings, books/papers, clothes and other fabrics, concrete, fiberglass insulation, ceramic tiles, bathroom tile grout, shower stalls, toilets, bathtubs, cabinets, medical equipment and systems.

[0126] The primers and oligos described herein can be used to detect one or more target polynucleotides associated with yeast and/or mold (e.g., chitin synthase (e.g., chitin synthase class III) or 1,3-β-glucan synthase (FKS1) genes or RNAs) present in food and environmental samples using the methods of the present invention.

### Kits of the Invention

[0127] The invention also features a kit for carrying out the described methods according to the present invention described herein. The kit includes nucleic acid probes or primers that may be labeled, reagents and containers for carrying out the hybridization assay, positive and negative control reagents, and instructions for performing the assay.

[0128] Some kits contain at least one target capture oligomer for hybridizing to a target nucleic acid. Some kits for detecting the presence or abundance of two or more target nucleic acids contain two or more target capture oligomers each configured to selectively hybridize to each of their respective target nucleic acids.

[0129] Some kits contain at least one first amplification oligomer (e.g., a SMART tag NT7 primer) for hybridizing to a target nucleic acid. Some kits for detecting the presence or abundance of two or more target nucleic acids contain two or more first amplification oligomers, each configured to selectively hybridize to their respective target nucleic acids.

[0130] Some kits contain chemical compounds used in performing the methods herein, such as enzymes, substrates, acids or bases to adjust pH of a mixture, salts, buffers, chelating agents, denaturants, sample preparation agents, sample storage or transport medium, cellular lysing agents, total RNA isolation components and reagents, partial generalized RNA isolation components and reagents, solid supports, and other inorganic or organic compounds. Kits may include any combination of the herein mentioned components and other components not mentioned herein. Components of the kits can be packaged in combination with each other, either as a mixture or in individual containers. It will be clear to skilled artisans that the invention includes many different kit configurations.

[0131] The kits of the invention may further include additional optional components useful for practicing the methods disclosed herein. Exemplary additional components include chemical-resistant disposal bags, tubes, diluent, gloves, scissors, marking pens, and eye protection.

### EXAMPLE

[0132] The present invention can be illustrated by the use of the following non-limiting example:

### Example 1

### Reverse Transcription-Mediated Amplification (RTMA)/PCR for Yeast and Mold Assay, Single Copy Gene Target

[0133] The yeast/mold assay of the invention may be performed using nucleic acid amplification methods known in the art (e.g., those methods described in WO 2007/146154 and US 2001-00323362, which are incorporated by reference herein in their entirety) using the nucleic acid probes and primers described herein. An RTMA assay for discriminating between yeast and/or mold in a sample is shown in FIG. 8 and described in detail below.

[0134] Since the yeast/mold assay attempts to detect a considerable amount of yeast and mold species, optional features of the assay can be used to reduce background and prevent detection of environmental contaminants once the sample is run in an open environment. The background reduction technology (BRT) used to control environmental contamination and decrease false-positive rates may include the following, optional, modifications:

[0135] a) SMART oligos: These oligos are designed in a way that the 5′ end of the oligos carries a tag sequence that is complementary to the 3′ end of the oligo and closes the oligo at the amplification temperature of 42° C. Therefore a SMART tag oligo prevents access to the target specific part of the oligo at lower temperatures and reduces false-positive rates of contaminations that come into the assay after target capture. The assay described below may include the use of SMART tag oligos.

[0136] b) non-target related tag: a non-target related sequence is inserted into the non-T7 (NT7) primer, between target specific sequence and SMART tag. By introducing a tag sequence into the NT7 primer, the system can be amplified with a non-target related primer after a first reverse transcription reaction using the tagged NT7 primer. This greatly reduces the effect of contaminating nucleic acids introduced into the system during or after target capture and increases amplification efficiency by improving the tag sequence.

[0137] Taken together, the SMART tag NT7 primer may contain both a SMART tag as well as a non-target related tag sequence. The SMART displacer only has a SMART tag since no displacement is needed after the initial reverse transcription reaction to generate a cDNA.

[0138] 1) Target Capture and Primer Annealing:

[0139] The fungal organism needs to be lysed to access the genomic DNA and RNA target(s). Lysis could be mechanical (e.g., beads) or chemical (e.g., alkaline lysis). Another important step to allow efficient capture of the genomic DNA and RNA target(s) is the denaturation of the DNA and RNA, thereby separating complementary DNA strands. Efficient denaturation can be either achieved by heat treatment (>85° C.) or treatment with high alkaline (needs to be neutralized with acid before target capture).

[0140] The next step in an RTMA approach is pre-annealing of the NT7 primer, the displacer and a blocker. The blocker is a 3′ blocked methoxy oligo that is annealed together with the NT7 primer and the displacer. An optional target capture (TC) oligo may also be annealed to the denatured single, stranded DNA or RNA target. For efficient capture of single stranded DNA a wobble capture oligo may be used as the TC oligo. The target capture (TC) oligo consists of a random GU mixture that is 18 nucleotides long, has a spacer region of 3 T and 30 A that allows binding of the polT tails of magnetic beads to allow the separation and capture of nucleic acids from the sample. To further reduce false-positive rate the wobble target capture oligo can be closed by a 15T long SMART tag that allows binding to the 5′ polyA tail. Annealing of all these oligos to the target is most efficiently done in lysis buffer at 60° C. for 10 (to up to, e.g., 60 minutes). This allows the SMART tags, if present, to open and the target specific regions to bind to target if present. After the annealing the sample is cooled to RT and should not be heated higher than 42° C. from this point on. Cooling to RT (a temperature of about 5° C. to about 30° C., in particular from about 10° C. to about 27° C. (e.g., about 23-27° C.)) forces the SMART tag oligos, if present, that are not bound to target to close and therefore renders them incapable of priming at 42° C. All steps up to this point should be done in a sterile contained environment, yet after the SMART tags are closed, target capture and amplification can be run in an open system.

[0141] For an amplification approach (e.g., a PCR approach), only the target capture would be annealed to the target in this step.

[0142] If a TC oligo is used in the assay, magnetic beads with a poly T tail may be added to the reaction and used to separate nucleic acids and annealed primers from the rest of the sample. Different platforms allow a semi-automation of this magnetic separation (e.g., KingFisher or DTS). After magnetic separation the beads containing the captured nucleic acids may be introduced into the amplification reaction.

[0143] 2) Reverse Transcription-Mediated Amplification (RTMA)

[0144] Target nucleic acids generated in the RT step are now amplified at 42° C., with the non-target related tag primer and a target specific T7 provider. The T7 provider is 3′ blocked and is not a primer. Specific RNA amplicon can be detected in a real-time format using a torch that is designed to detect universally conserved regions for all yeast and mold. Yeast and molds can be distinguished in a real-time assay using different fluorophores to mark the different torches.

[0145] In a PCR assay, the captured target would now be amplified using redundant forward and reverse primers and a molecular probe (beacon or TaqMan probe) to monitor amplification in real-time.

[0146] To provide a sterile environment for the first part of the assay, lysis buffer as well as oligos can be base-treated and then neutralized. This treatment protocol can be further extended to ensure the destruction of contaminating DNA or RNA.

[0147] Other details of the RTMA procedure can be found in, e.g., U.S. Patent Application Publication No. 2011-0014623, which is incorporated herein by reference.

### Example 2

### Detection of Gene Targets Using RTMA for a Mold and Yeast Assay

[0148] Using the RTMA method described in Example 1 (without the optional SMART tags), DNA targets in various mold and yeast species were detected in an inclusivity panel for molds and an exclusivity panel for yeasts. The following oligo sequences were used in this assay: T7 provider (7.5 pmol/reaction), torch (8 pmol/reaction), NT7 primer (5 pmol/reaction), displacer (0.5 pmol/reaction), and blocker (0.5 pmol/reaction), where these sequences are provided in FIG. 9. For amplification, APTIMA® buffer and enzyme (from Gen-Probe Inc., San Diego, Calif.) were added in a reaction volume of 40 μl. The assay included DNA from various mold and yeast species, as provided in FIGS. 10 and 14. Amount of amplified target DNA was calculated based on genome length and ng of DNA isolated from fungi.

[0149] Using the Chitin Synthase class III oligo sequences of FIG. 9, the assay provides amplified products for the mold species in the inclusivity panel (FIG. 10) but not the yeast species in the exclusivity panel (FIG. 14). Various species of mold were amplified using 1×10⁵, 1×10⁴, or 1×10³ copies of genomic DNA as input (FIGS. 11-13, respectively). In contrast, yeast species (using 1×10⁶ copies of genomic DNA as the target input) were not amplified in this assay, where only positive control using two mold species were amplified (FIG. 15). Taken together, the methods, compounds, and kits disclosed herein can be used to detect and distinguish between yeast or mold in a sample.

### OTHER EMBODIMENTS

[0150] All publications and patent applications mentioned in this specification are herein incorporated by reference to the same extent as if each independent publication or patent application was specifically and individually indicated to be incorporated by reference.

[0151] While the invention has been described in connection with specific embodiments thereof, it will be understood that it is capable of further modifications and this application is intended to cover any variations, uses, or adaptations of the invention following, in general, the principles of the invention and including such departures from the present disclosure that come within known or customary practice within the art to which the invention pertains and may be applied to the essential features hereinbefore set forth.

The application's sequence listing, which the Patent Office published only in electronic form, follows.

SEQUENCE LISTING (159 sequences)

SEQ ID NO: 1 - DNA, 4641 bp, Ajellomyces capsulatus
  misc_feature (154)..(154): n is a, c, g, or t
aacaaagaaagttacggtaaatttcacgctagtacccagccagaagctgggtacggctcctgtgctctgtacagtccggccataccataccataccataccgtaccataccgtaccatatcacgttcatccacccgtttgcccccaagagaaatatcatcatcgccttttcgggcctgtagcttactttcttttttcctatttttttcttttctatttctatttctatttctatttctatttcgctgcttattattctcgcctgttggtcttgtccagcaagcctgggaatatcaagcgctcgtctgtggtttgtttttatccgttgccctgctttgtgtcccgctgcccccttagctccctgtggcttcgctgcccctaaaaaaacaatcatcttcttcttccgctgctctgttctcgctcgtctctcttctctcttctcttttctctgcctctcttcctcctctcgatccatccatctattctcccctctatccttctatccgcttcatcaacccagcctctcgttttgacggcggccacagctccctcatcatggcctatccaggctcgaactctccaggggggtacggcgatggccatcgactccatgacctcccatctggcagcgtgagaaaacactctttcctatgtatatgcatatgatatagatatagatataggtatacatttatatacatatataagagagcgtgtgtgtctgtgtgtgtgtctgttttgtgtgtgtgtatctgtctgtatatatatacacatcgatatatatatgcttttggctacgtattcaagcactggttccccctggtcgcgggccacggtaccagtggtttcaggatgatatcctctcaacacaggaaccaccccttgctaacttgccccttaaatcgctccagcaatataatcttcccgccgaacacgatgcctcccaatcgctcctccaccaaaaccaaggcccattcagcggcccctttgatgacccccaacaccaccaccgcggtggctctcctgtccgatccccctccagatacagcctgacagaatcctacgtaaccgaccatccccaagctcaagaccactacggcggccaaatggaaaatcccgccgctggctttggtgttcccggtcgggttccgtccccctatacccgcagtgagacctcctccacggaggcctggcgtcagcgacaggcgcccggcaatctgcgccgttatgccaccaggaaagtcaaacttgtccaaggctctgttctcagtgtcgattatcccgttcccagtgctattcagaatgccgtgcaggctaaataccgcaatgatctcgaaggtggtagtgaggaattcactcatatgcgatgtaggtttttgtccttgatttctttttctttttactcccctctgctttggtttatggtcgtctccttgctgatttgctgctgccatcttagacaccgccgctacctgtgatcccaacgagttcactctgcacaatgggtacaatctgcgcccggcgatgtataaccgtcataccgaactgctgattgctattacctattacaatgaagacaaaatgcttacttcgcgcaccctgcacggcgtaatgcaaaatatccgtgacattgtgaacctcaagaagtccgagttctggaacaaaggtggacctgcttggcagaaaatcgttgtctgtctggtcttcgatggaatcgacccttgcgacaaagacaccctcgacgtgctggccacaattggaatctaccaggatggcgtgatgaaaaaagatgtcgatggaaaggaaaccatcgcccacattgtcagtacatatatgatacccgtagcccaattttttgcaccttctactactgctacactgtactaacttcccgtctagtttgaatacaccacccaactctcagtcaccgcaaatcagcaactgatccgaccgcacgatgatggcccatcgacgcttccccctgtgcagatgatgttctgcttgaaacaaaagaacagtaagaaaatcaactctcacagatggctgttcaatgcctttggccgaatcctcaacccggaaatctgcatcttgctcgacgcgggtacgaagccgggtcataaatccctcctggcactgtgggaagccttctataacgacaaagatctgggcggctcgtgcggcgaaatccacgctatgttgggcaaaggctggaaaaacctcatcaaccctcttgttgcagcgcaaaacttcgaatacaaaatcagtaacatcctggataaacctctggaatcctccttcggctacgtcagcgtgttgcccggtgccttctctgcctaccgcttccgtgcaatcatgggcagacctctcgaacagtacttccacggtgaccatacactctccaaacaactcggtcccaagggtatcgagggcatgaacattttcaagaagaacatgttcttggccgaggatcggattctgtgtttcgaactcgtggccaaggccgggtccaaatggcatctgtcctacgtcaagtcgtccaagggcgagactgacgtgcccgagggagcccccgaattcatcggccagcgtcgtcggtggctcaacggctcgttcgcagctagtatctactcattgatgcattttggccgaatgtataagagcggccataaccttctgcgcatgttctttttccatattcagatgatctacaatacgtgcaccgttatcatgacttggtttgcgcttggtatgtgttgttcaacaatataagtctttgttcctccgaacaatgacatccctctttcaacttccactttcttcttgcgtctattgtctcccaacactaacatgttctagcttcatactggctcacaacttccgtcatcatggacctcgtcggaaaccctcccgctccagaatctggcagcacgcagagggcattcccattcggcaataccgccactccgattgtcaacactgttctgaagtacttgtatctggccttcctgctcttgcagtttattttggctttgggtaaccggcctaaagggtgagtttgcataatctcctagtcaactaaggggagcttcagaaatatccaattcgtggcattgttattttcattgcccttctccccggcgagattcccggcgctgagctccgatatatgcgttagatgatactgatagcgcccctcagatctaaacactcgtacatcacctccttcgtcgtattcggcattatccaattgtacatcattgtcttatccatgtacctcgtcgtccgcgccttcagcggtggcacactcgccttcacaacagacaaaggtatcggcgaattcctcaagtccttcttcagttccgaaggaccgggaatcatcatcatcgccctcgccgctaccttcggcctctatttcgtcgcctctttcatgtaccttgacccctggcacatgttcacctccttcccggcctacctcctgatcatgtcctcgtacatcaacatcctgatggtctacgccttcagcaactggcacgatgtgtcgtggggcacaaagggtgcggacaaagccgacgctctgccctctgcccaaacgcaaaaggaagacgacggcaaagctgctgtgatcgaggagatcgacaagccgcaggcggatatcgacagccagtttgaaagcactgtgaagcgtgcgctgacgccgtacgtggagccaaaggtgaaggaggggaagtcgctagatgattcgtataagagtttccgcacgcggttggtgacgctatggctgttttcgaatggcattcttgccgtggccattaccagcgaggatgtgaacaagtttggattcacggtaggccttactttccttttttcccccttcctctttttttttttttctttcgccttttggggaaaaaaaaaaataaaaaaataaaaacactttgctaacgtgttcctcccacaatccagtcccgagcaaccagccgaaccacgcatttcttccacgctctcctttgggcgaccgcagcgctctccctcatccgcttcaccggcgcatgctggttccttggccggactggaattatgtgctgcttcgcgagaagatagtcagtccatttggctctggattttctatatattttgtttggtgatgcaaaaatcttttgcttccctttttccttttctctttcgggtgacctttttgttgcgggcgacggcacgaaacccggaataatataagacaaggatgggggagaagagagcatgaagatcgaagatcgaaagtcgaaagtcgaaaattgaaaggagaagaaaggaaatgacaagaaactggcagctgccgcttggccaactgttggaaagtttttcttttgcatttctatgaatatgtcccgattttgtttttcttttcccattgcttgttgttcttttcgcttttttcgattcctttcctataataatggcaagatgtgtcctatttcctcctgcctggcctctcttttgtgtgtttctatatgcgtgagagcctctgaattccgaatctaatgttctgtttgttgtcttatttctctgatcgtccccgccccctggtgtttttgttgctgctgttcttgctgttactgctttttctgtttctgggtttttccct

SEQ ID NO: 2 - DNA, 2718 bp, Ajellomyces dermatitidis
atggcctatccaggctcgaactccccagggggttatggcgaaggccatcggctacatgacctccccccgtctggcaatcaatataatctccccgctgaacacgatgcctcacaatcgcttctccaccaaaaccaaggcccattcagcggtccctttgacgacccccatcatcagcacggtggctctcctgtccgacctccctcgagatatagcctcacagaatcttacgtaaccgaccatccccagtcccaagatcaatacggcggccacatggaaaacccagctgcgggcttcggtgtccctggccgcgttccatccccctatactcggagcgaaacttcctccaccgaggcctggcgtcaacgacaggctcctggtaacctgcgccgttatgccaccaggaaagttaagctggttcaaggctccgtgctcagtgtcgattatcccgtccccagtgctattcagaatgctgtgcaggctaaataccgaaatgaccttgagggtggtagcgaggaatttacccatatgcgatacaccgctgctacgtgtgatcccaatgagttcaccctacacaatggctacaatctgcgcccggcaatgtataaccgccataccgagctgctgatcgctattacctactacaacgaagataagatgcttacttcgcgcaccctgcacggtgtgatgcaaaatatccgcgacatcgtcaatcttaagaagtctgaattctggaacaagggaggacctgcttggcaaaaaatcgttgtttgtctggtcttcgacggaattgacccatgcgacaaagataccctcgatgtgctcgccaccattggagtctaccaggacggcgtgatgaagaaagatgttgatggaaaggaaaccatcgctcatattttcgaatatactacccaactatccgtcaccgcaaaccaacaactgattcgaccacacgatgacggcccatcgacgcttccccccgtgcagatgatgttctgtctaaagcagaaaaacagcaagaaaatcaactctcacagatggctgttcaatgcttttggccgaatcctcaacccggaaatctgtatcctgctcgacgcaggtaccaaacccggccctaaatccttacttgcactttgggaagctttttacaacgacaaagatcttggtgggtcctgcggtgagatccacgctatgttgggtaagggctggaagaacctcatcaaccccctcgtcgcagcgcagaacttcgaatacaaaatcagtaacatcctggataaaccgctggaatcctctttcggatacgtcagcgtgttgcccggtgccttctccgcttaccgcttccgtgcaatcatgggtagaccgctcgaacagtacttccacggtgaccatactctttccaaacaacttggccccaaaggtatcgagggcatgaatattttcaagaagaacatgttcttggccgaggatcggattctgtgtttcgaacttgtagccaaagccgggtctaaatggcatttgtcctacgtcaaatcgtccaagggggagactgacgtgcctgagggagctgcggaattcatcggtcagcgtcgtcggtggctcaacggctcgttcgcggcgagtatctactcgctcatgcactttggcagaatgtataagagcggccacaatctcctgcgcatgttcttcttccatattcagatgatttataatacgtgtacggttttcatgtcttggtttgcgcttgcttcctactggctcacaacttccgttatcatggacctcgttggcagtcctcccgctccagaatctgggaaccagcagagagcattcccattcggcaacacggctactccaattgtaaacacgattctgaaatacttgtatctggccttcctactcttacagtttattttgtcgttgggtaaccggcctaaaggatccaaacactcgtacatcacctccttcgtcttattcggcctcatccaagtgtacatcatcatcctatccatgtatctcgtcatccgtgctttcagcggtggcacactggctttcacaacagaccaaggcattggtgaattcttcaaatccttcttcaattccgaaggaccaggaatcatcatcattgcactcgccgcaaccttcggtctctactttgtcgcctccttcatgtacctcgatccctggcacatgttcacgtccttccccgcctacctcctaattatgtcttcctacatcaacatcttgatggtctacgccttcagcaactggcacgacgtttcctggggaacaaaaggcgccgacaaagccgacgcactcccttctgcacagacgcaaaaggaagatgacggcaaagccgctgtgattgaggagattgacaagccgcaggcagatattgatagccagtttgagagcactgtgaagcgcgcgctgacgccctatgtggagccgaaggtgaaggagggcaagtctctagatgattcgtataagagtttccggacacggttggtaacctcgtggctgttctcgaatgggattcttgcagtcgctatcacgagtgaggatgttaataagtttggatttacgtcccgagcaaccaaccgaaccacacatttcttccaggctctcctgtgggcaaccgcagcgctgtctctagtccgcttcatcggcgcttgttggttccttggccggacgggtattatgtgctgctttgcgagacggtag

SEQ ID NO: 3 - DNA, 2892 bp, Arthroderma benhamiae
atggctcaatatccacaggatcagatgcagaatcctgctgccggctttggggtaccgggacgcgttccttctccctatacccgcagcgagacctcttccaccgaggcctggcgccagagacaggctcctcaacaaggcaacctccgacgttatgccaccaggaaggttaagcttgtccagggctctgtcctcagtattgactacccggtgcccagtgcgatccagaacgccgtccaagccaagtaccgcaacgaccttgagggcggcagcgaagagtttacccatatgagatatactgctgctacctgtgatcccaacgagttcactcttcacaatggctacaacctgcgtccagccatgtacaaccgccatactgagctgctcattgccattacctactacaacgaagacaaggtgctcactgctcgtaccctccacggtgtcatgcagaatatcagagacatcgtcaacttgaagaagtccgagttctggaataagggtggtccggcctggcaaaagattgttgtggctcttatcttcgacggtattgatccctgtgacaaggacactctcgacctccttgcgactgttggagtttaccaggatggtgtcatgaagaaagatgttgacggaaaggagaccgttgctcacattttcgagtataccacacagctctctgtaactgcgaaccagcaactcatccgcccccatgatgacagtccgtccaccctcccacctgtgcagatgatgttctgcctgaagcaaaagaacagcaagaagatcaactcccacagatggctctttaacgcttttggccgcatccttaaccctgaagtctgtatcctgctcgatgcaggtaccaagccagggtcaaaatccttgcttgccctttgggaggccttttacaacgacaaggatcttggtggatcttgtggtgagattcacgctatgttgggtaaaggatggaagaacctcctcaatcctcttgttgccgcgcaaaacttcgagtataagatcagtaacattcttgataagccgctagagagttcgtttggctacgtcagtgtgttgcctggtgctttctcggcctaccgattccgcgccatcatgggaagaccgctagaacagtacttccacggtgaccacactctgtccaaacagctcggtcccaagggtattgagggcatgaacatcttcaagaagaacatgtttttggctgaagatcgtattctctgtttcgaacttgtcgccaaagctggatctaagtggcatcttacatacgtcaaatcctccaagggtgaaaccgacgttcccgaaggagctcctgaatttatcggtcagcgtcgtcgatggctcaatggttcgtttgccgccagtatctacgctctcatgcactttggcagaatgtacaagagtggtcataacatccttcgcatgttcttcttccacattcaaatgctgtacaacactttcactgtctttatgacctggtttgctctcgcttcgtactggcttactacagccgtcatcatggacctcgttggcaaccctggcccgtccaacggcaacagagctttcccatttggcaacaaagtgacccctatcctgaacactctgttgaaatacgcgtaccttggctttttgctcctacagttcattcttgctctcggcaacagacccaagggttccaaacactcgtacatcacctcgttcgttctttttggtgtcatccaattgtatatcatcattttgtccatgtacctggttgctcgagccttctctggcggtacctccttgtcgttcgaaaccgatcatggccccgttgagttcttgaaatccttcttcggctcgtccggccccggtatcattgtcatcgctctcgccgctacctttggactctacttcatcgcctcgttcatgtactgcgatccatggcacatgttcacctctttcccggcttatctgcttatcatgtcctcatacatcaacattctcatggtctacgctttcagcaactggcacgatgtgtcctggggtaccaagggatctgacaaggccgatgccctaccatccgtacagaccgtgaaggaggacggaaaatcagcaacgattgaagaagtcgacaaaccccaggcagacattgacagtcaattcgaaagcaccgtcaagcgcgctctgaccccatatgtcgaacccaaggtggatgagaaaaagacgctcgaggattcgtacaagagtttccgtacccgtttggtctcatcctggctcttctccaatgctatcctcgctgttgccattacaagcgacaaactgactgctcttggttttacatcacaagccactgaacgtaccagtcgattcttccagtctctcctgtgggcaactgcggcgctgtctcttattcgattcatcggagcatgctggttccttggcaaatccggtatcattttcccttttctttcaattcttttctatattttctgctttttccttttttccttttttttttactccctatgtcttctcttttcctcggttacttcttctcctatctcctttcctgtttttgcccagcttatgccaaattctattctaatgcccattcctgacctggccggggacgtgtcttgtattttagatgaatattctctgttatttatgtacctgaccatttcttccccatgtttcaattctcccttctcgcgtggccactctgttcgtctgcacccgtggctgtctatctatcctctggaggctcctcaatcggaagtatggtcttcgatatcctccgggctccatgaaaatatgccaaattgcacccttcccccatatactatttatcgaagcgtctttcatatatatccataccaaactccaattacatacctttga

SEQ ID NO: 4 - DNA, 2706 bp, Arthroderma otae
atggcctatccaggccccagttcgccaggaggctacaatgacggccacaggctacaggacatcactccctctgcgagccaataccatctgccacaagaggacgagtcttctcgctcgcttctcaatcagggtccctacggcgggcccttcgacgacccccagcaacgaggacactcgcccgtcaggcccgcctccaagtacagtctgaccgagtcttactcgacggacgctcccaccatggcccagtacccgcaggaccagatgcagaacccagctgccggctttggcgtgcccggacgtgtgccctcgccttacactcgcagcgagacctcctccaccgaggcctggcgccagagacaggctccccagcaaggcaacctgcgtcgttatgccaccaggaaggtcaagcttgtccagggctccgtcctcagtatcgactatcccgtgcccagtgctattcagaatgccgtccaggccaagtatcgcaacgacctcgagggcggcagcgaggagttcacccacatgagatataccgcggccacctgcgatcccaacgagttcaccctgcacaacggctacaatctgcgtccagccatgtacaaccgtcacaccgagctactcatcgccatcacctactacaacgaagacaaggtgctgaccgcccgtacgctccacggtgtcatgcagaacatcagagacatcgtcaacctgaagaagtccgagttctggaataaaggcggtcccgcttggcagaaaatcgttgtcgctctcatctttgacggcatcgatccatgcgacaaggacacgcttgatctcctcgccaccgtcggcgtctaccaggacggcgtcatgaagaaggatgtcgacggaaaggagaccgttgctcacattttcgagtataccacacagctctctgtgactgcgaaccagcagctcatccggccgcacgatgacagcccctctactcttccgcccgtccagatgatgttctgtttgaagcagaagaacagcaagaagatcaactcccatagatggctcttcaacgcctttggtcgtatcctcaatcccgaaatatgtatcctccttgatgccggtactaagccagggccaaaatccctgcttgccctgtgggaggccttctacaatgacaaggacctcggtgggtcgtgcggtgagattcacgccatgttgggtaaaggatggaagaacctcatcaaccctctcgttgccgcccagaacttcgagtacaagatcagtaatattctcgacaagccgctggagagttcttttggatatgtcagtgtgttgcccggtgccttctcggcctaccgattccgcgccatcatgggaagaccgctggaacagtacttccatggtgaccatactctctccaagcagcttggccccaagggtatcgagggcatgaacatcttcaagaagaacatgttcttggccgaagatcgtattctctgcttcgagcttgtggccaaagccggctctaagtggcatcttacctacgtcaagtcctccaagggtgagactgacgtccccgaaggagctccagagttcatcggtcagcgacgacgatggctcaacggttctttcgctgccagtatctacgctcttatgcatttcggcagaatgtacaagagtggacacaatattattcgcatgttcttcttccacattcagatgctttacaacactttcactgtcttcatgacctggttcgcccttgcttcgtactggcttactacctccgtcatcatggatcttgtcggtaaccccggtccgtctaacggtgagagagctttcccgttcggtaacagggtcactcccatcttaaacactctgttgaaatacgcataccttggctttttgctcctgcagtttatcctcgcactcggtaacaggcccaagggttccaagcactcgtacatcacatcgttcgtccttttcggcgtcattcagctatacatcatcattctatccatgtaccttgtcgcccgagccttcaatggtggtacctccttatcttttaacacttcaaatggcccagtcgagtttataaaatccttcttcggctcatccggcccgggtattatcgtcattgctcttgcggcaacctttggtctctactttatcgcctccttcatgtactgtgacccatggcacatgttcacttctttcccggcctacctcctcatcatgtcctcgtacatcaacattcttatggtctacgcttttagcaactggcatgatgtttcctggggtactaagggatctgacaaagctgatgccttgccatccgttcaaacaacaaaggaggatggaaagtccgccacaattgaagaagttgacaagccccaggcagatattgacagtcaatttgaaagcaccgtcaagcgcgccctgactccatatgtcgaacccaaggtcgatgagaagaagaccctcgaggattcgtataagagtttccgtacccgattagtctcttcttggctcttctcgaacgcaattctggccgtcgctattacaagtgatagtgtaaaatcgctcggatttacttcacaagccaccgagcgtaccagtcgcttcttccaggctcttctgtgggcaactgctgcactctctctcattcgattcattggagcatgctggttccttggtaaatccggcattatgtgctgtttcgctagaagatag

SEQ ID NO: 5 - DNA, 2736 bp, Aspergillus clavatus
atggcctaccaaggctctggctcccattcgccgccccagtacgacgacaacgggcaccgacttcaggatctgcctcatacttcttacgaagaggaagcgtcgagaggattgctatccaaccagcagggtcctttcactggtccgttcgatgaccctcaccagcgcggtcattctccaactcgtcccgtctccggatacagtctgaccgaaacctacgcccctgaagcggcttactccgacccctacaacaccgccggtcctggttcggtgtactctgcccagtcgaccgaaaatccagccgcagcctttggtgtccctgggcgtgtcgcttccccctatgctcgaagcgacacctcgtcaacagaggcatggcgccagcgacaagctcctggaggcggccccggtggtctgcgacgttatgctaccagaaaggtcaagctggtgcagggttccgtcctgagtgtggattatcctgtgcctagcgccattcaaaacgccattcaggcgaaatacagaaacgaccttgagggcggtagcgaggaattcacgcacatgcgatacaccgcggcgacgtgcgatcccaatgacttcaccttgcacaacggttataatctgcgacctgcgatgtacaacagacataccgagctgctgatcgcggtcacctactacaacgaagacaagaccctcacatcgcgtactctgcacggtgtcatgcagaacatccgagacattgtgaatctcaagaaatccgagttctggaataagggtggtcccgcctggcagaagatcgtggtctgcttggtcttcgacggtatcgacccctgtgacaaggatacgctcgatgttctggcaacgatcggtatctaccaggatggtgtcatgaagcgtgacgttgacggaaaggaaacggtggctcacatcttcgaatacacaactcaattgtccgtgaccccgaatcagcagctcatccgacccacagatgacggtcccagcacgctccctccggtgcagatgatgttctgcctgaagcagaagaacagcaagaagatcaactcgcacagatggctcttcaatgcctttggtcgcattctcaaccctgaagtctgcattcttcttgatgcgggtacaaagcccggccccaagtcgctcctttatctgtgggaggccttctacaacgataaggatctcggtggtgcatgcggtgagattcacgccatgttgggtaagggttggaaaaacctgatcaacccgctggtcgctgcccagaactttgagtataagatcagtaacattctggataaacctttggaaagttcctttggatacgtcagtgtgttgccgggtgccttctcagcctaccgattccgcgccattatgggccgtccgctggagcagtacttccatggtgaccatacgctctctaagcaactgggtaagaagggtatcgaaggcatgaatattttcaagaagaacatgttcttggccgaagatcgtattctctgttttgagctggtcgcgaaagctggctccaagtggcatttgtcgtacgtcaaggcctccaagggtgaaactgatgtgccagaaggtgctcctgaattcatttcccagcgtcgtcgttggctgaacggttcgttcgctgccggtatctactcgctcatgcatttcggtcggatgtacaagagtggacacaacatcatccgcatgttcttcctgcacattcagatgttgtataacatcttttctacgatcctgacatggttttctctggcttcctactggcttactacaacggtcatcatggacctggtcggcagtccctctgatgaaaacggccattctgccttcccatttggtaaaaccgcgactccagttatcaacaccctggtgaagtacatctacctgggtttcttgcttttgcagttcattctcgctctgggtaatcgtcccaagggttccaagttctcgtatctcgcgtctttcgtggtgtttggcatcatccaggtctatgttgtgatcgatgctctgtacctggtggtgcgcgcatttaccggaacttccaagatggatttcgtcaccgataagggtgtcggcgagttcctcagttccttcttcggatccagcggtgctggtatcatcattatcgccctcgcagctacattcggtctctacttcgtggcatccttcatgtacatggatccctggcatatgtttacctccttccctgcctatatgtgtgtccagtcgtcctacatcaacattctgaacgtctatgccttcagcaactggcacgatgtctcctggggtaccaagggttccgataaggcagacgcacttccctcggccaagaccaccaaagacgatagcaaggaggttgtcattgaagaaatcgacaagccccaggccgatattgacagtcaatttgaggccaccgtcaagcgtgccttgacaccctatgtaccaccggtggagaaggaggagaagaccctggaagattcgtacaagagtttccgaacccgactggtcaccttctggattttcagcaacgctctcttggctgtctgcattaccagcgacggtgttgacaagtttggtttcacgaacaatgccaccgatcgaacatcccgtttcttccaagctctgctgtggtccaacgccgtcgtcgccgtgttccgctttatcggagccacttggttcctggccaagaccggtgttatgtgctgctttgctcggcggtag

SEQ ID NO: 6 - DNA, 2793 bp, Aspergillus flavus
atggcctaccaaccgcctggtaaagataatggtgctcagtcaccaaactacaacgatagcggtcatcgactggaagacctgccccatggcgccactatcgtagcaaccgcgaatcgttctggacaagctgacattgcgtatgaagaagaagcttcaacaggactgctttcccaccaacagggcggtcctttcggtggtcctttcgacgaccctcatcagcgtggcacctcgcctgttcgacctacgtcgggatacagcttgactgaaacatacgctccggacgcgggttttcatgacccttacagcacgacgggctcggtttactccggcaactcggcagaaaaccccgcggctgcctttggcgtcccgggtcgtgtagcttccccctacgctcgcagtgaaacatcctccacagaagcatggcgccagcgccaggctccaggaggtggtggcggtggtggcctccgtcgttacgctaccagaaaggtcaagctagttcagggttccgtcctcagtgtcgattaccccgtccccagtgctatccagaatgccatccaagccaagtaccgtaatgacctggagggtggcagcgaggagtttacccacatgcgatacaccgctgcgacatgtgatcccaatgacttcaccctgcacaatggttacaatctgcgtcccgccatgtataacagacacaccgagttgttgattgcgattacctattataacgaagataagacccttaccgctcgtaccttgcacggtgtgatgcagaacattcgcgacattgtgaacctcaagaagtccgagttctggaacaaaggtggacccgcctggcagaaaattgttgtcgctctggtctttgacggtatcgatccttgtgataaggacactttggatgtcctcgccaccatcggtatctatcaggacggtgtcatgaagcgtgacgtcgacggcaaggagaccgtggctcatattttcgaatacacgacccaattgtccgtgacaccgaaccagcaactcatccggcccactgatgatggcccgaccaccttgcccccggtgcagatgatgttctgcttaaagcagaagaacagcaagaagatcaactcacacagatggctgttcaatgccttcggtcgtattttgaatccagaggtttgcatccttctggatgccggtactaagcctggccagaagtccctcctggcgttgtgggagggcttctataacgacaaggatctgggaggtgcttgtggtgaaattcacgcaatgttgggtaaaggctggaagaacctgatcaaccccctcgtcgcggcccagaacttcgagtacaagatcagtaatatcctcgataaacccttggagagttctttcggttatgtcagtgtgttgcctggtgctttctccgcctatcgtttccgtgccatcatgggtcgacccctcgaacaatatttccatggtgatcacactctctcaaagcagctgggtaagaagggtattgagggcatgaacatcttcaagaagaacatgttcttggccgaagatcgtatcctttgtttcgaactggtcgccaaggctggctccaaatggcacttgtcctacatcaaagcctcgaagggtgaaactgacgtgccggaaggtgttgctgaattcatttcccagcgtcgtcgttggttgaacggttcttttgcggccggtctctattcgcttatgcatttcggtcggatgtacaagagtggacataacatcatccgtatgttcttcttgcacattcagatgttgtacaacgttttcaacactatccttacatggttctccctggcatcttactggttgaccaccaccgtcatcatggacttggtcggaacgcccagtgagagcaacggtaacaaaggattccccttcggtaaatcggcgacccctattatcaacacaattgtgaagtatgtctacctcggattgttgctcttgcagttcattctcgctctcggtaaccgccccaagggatcccgcttctcgtacctgacatctttcgtcgtattcggtatcattcaaatctacgttgtcgtcgacgctctgtacttggtggttcgtgcattcacaaacagtgatgcgatagatttcgtcaccgatcaaggtgttggcgagttcctcaagtcgttcttctcgtcttccggcgccggtatcattatcatcgccctggctgctactttcggtctctacttcgtcgcttcgttcatgtacctggacccttggcatatgttcacctcgttccccgcctacatgttcgttcagtcatcttacatcaacgttctcaacgtgtacgcgttcagcaactggcacgatgtctcgtggggtaccaagggttctgataaggccgatgcgctcccttctgcaacgactacgaaggaggatggcggcaaggaagctgtcattgaggaaatcgacaagccccaggctgatattgacagccaatttgaagccactgtcaagcgcgctctcaccccctacgtcccccctgtggagaaggatgagaagtccttggatgattcctacaagagtttccgtacccgtcttgtgacgttgtggatcttcagtaatgccttcttggctgtatgcattaccagtgacggtatggacaagtttggattcacgaacaccgctaccgaccgtacgtcgcgtttcttccaggctctcctgtggtccaacgctgctgtcgcacttgtccgtttcattggtgcctgttggttcctgggtaagacgggtctcatgtgctgcttcgctcgtcggtag

SEQ ID NO: 7 - DNA, 2736 bp, Aspergillus fumigatus
atggcctaccaaggctctggttctcattcgccgcctcactacgacgataacggtcaccgacttcaggatctgcctcatggttcgtacgaagaagaggcgtcgagaggattgctatcccaccagcagggtcccttcacagggccgtttgatgaccctcagcagcatggttcatctactaccagacccgtttctggatacagtttgagcgagacctatgcccccgaagccgcatatcatgatccctatactcaaccgagccctggctcggtctactcggctcaatctgcggagaatccggcggcggcttttggtgtccctggacgtgtcgcgtccccctatgctcgaagtgacacttcatccacagaggcatggcgccagagacaagctcctggaggcggccccggtgggttgcggcgttatgctacaagaaaggtcaagttggtgcagggttccgtcctgagtgtcgattatcctgttccgagcgcgatccagaatgctattcaggccaagtacagaaatgatctcgagggtggaagtgaggaatttacgcacatgcgatacaccgcggccacctgtgatcccaatgaatttacactgcacaatggttacaatcttcgacctgcgatgtacaacagacataccgaacttctcattgcgatcacctattataacgaagacaagacactcacttcacgtacactgcacggtgtcatgcagaacattcgcgacattgtgaatctgaaaaagtccgagttctggaacaagggtggtcctgcctggcagaagattgtggtctgcctggtttttgatggtatcgacccttgcgacaaggacactttggatgttcttgcgacaatcggtgtctaccaagacggcgtcatgaagcgtgacgtcgatggaaaagagactgtggctcacatttttgaatatacgactcaactgtctgtgactccgaatcagcagctgatccgccccaccgacgacggtcccagtacacttcctccggtccagatgatgttctgtttgaagcagaagaacagcaagaagatcaactcccacagatggctcttcaatgcatttggtcgcattctcaaccccgaggtctgtattcttcttgacgccggtacaaagcctggcccgaagtcacttctgtcgctttgggaagccttctataacgataaagatttgggtggtgcttgcggtgagattcacgccatgttgggtaagggttggaagaacctgatcaacccgctcgttgccgctcagaacttcgaatataagattagtaacatcctggacaagcccttggagagttcatttggttatgtcagcgtcttgcctggtgccttctcagcttaccgattccgcgcaattatgggccgccctctcgagcagtatttccatggtgaccacactctttcaaagcaactgggcaagaagggtatcgagggaatgaacattttcaagaagaacatgttcttggccgaagatcgtattctttgttttgagttggttgctaaagctggttcaaaatggcacctgacctatgtcaaggcctccaaggctgaaaccgacgtgccagaaggcgctcccgaattcatttcgcagcgtcgtcgttggctgaacggttcgtttgctgccggtatttattcgctcatgcactttggtcggatgtacaagagtggacacaacattgtccgcatgttttttctgcacatccaaatgttgtacaatatcttctctacggttctgacatggttttccttggcttcttactggcttactaccaccgtcatcatggacttggtcggcacgccgagcgacaataacggtaacaaggctttcccgttcggcaagactgcaactcccattatcaataccatagtgaaatatgtctacttgggattcctactattgcaattcatcctcgcgctgggtaaccgtccaaaaggatcgaagttctcatacctcgcgtctttcgtggttttcggcatcattcaggtctacgtggttattgatgcactgtacctggtggtgcgtgccttcagtggaagtgctcctatggatttcactacggaccaaggcgttggcgagtttctgaaatcgttcttttcatccagcggcgccggtatcattatcattgctctcgctgctacattcggtctctactttgtggcatcttttatgtatcttgacccctggcacatgttcacgtccttccctgcctacatgtgtgtccaatcgtcatacatcaatattctgaacgtctacgctttcagcaattggcacgacgtctcgtggggtaccaagggttcagacaaggcagacgctctaccttccgccaagaccaccaaggatgagggcaaagaggttgtcatcgaggaaatcgacaagcctcaggctgatatcgacagtcagttcgaggcaacggtcaagcgtgccctaacaccctatgtgccaccagtcgagaaggaggaaaagactctggaagactcgtacaaaagcttccgaacgagactggtcacgttttggatctttagcaacgccttcttggccgtttgcatcaccagtgacggtgtggataaattcggcttcacgaattctgctaccgaccggacgcagcgtttcttccaggctttgctgtggtccaacgctgtcgttgccctgttccgtttcatcggagcctgctggttcctgggcaagacaggtttgatgtgctgctttgcccggcgttag

SEQ ID NO: 8 - DNA, 3334 bp, Aspergillus fumigatus
cgtggttcgtgggcttcaaacattggccctggcgtcttcatccacgtttcttccttactgtgtccgcccctcgaccagcctttcagtaatttttcttttttcattgatctttcgacttttaacttcattgcttatctgtttcgcttgacttattggagtgttgatcgaatttattgtcctgtctgacttattctgactggcggtctccttactccttctcctgatacccccttcccgtttttccccttgcgttctgcttcagctcgcgtctgtcgattttccgtgtccttctcgcgcatactacagcattttgacaacagcttgacaaagcatcgacaccatggcctaccaaggctctggttctcattcgccgcctcactacgacgataacggtcaccgccttcaggatctgcctcatggttcgtacgaagaagaggcgtcgagaggattgctatcccaccagcagggtcccttcacaggcccgtttgatgaccctcagcagcatggttcatctactaccagacccgtttctggatacagtttgagcgagacctatgcccccgaagccgcatatcatgatccctatactcaaccgagccctggctcggtctactcggctcaatctgcggagaatccggcggcggcttttggtgtccctggacgtgtcgcgtccccctatgctcgaagtgacacttcatccacagaggcatggcgccagagacaagctcctggaggcggccccggtgggttgcggcgttatgctacaagaaaggtcaagttggtgcagggttccgtcctgagtgtcgattatcctgttccgagcgcgatccagaatgctattcaggccaagtacagaaatgatctcgagggtggaagtgaggaatttacgcacatgcgatacaccgcggccacctgtgatcccaatgaatttacactgcacaatggttacaatcttcgacctgcgatgtacaacagacataccgaacttctcattgcgatcacctattataacgaagacaagacactcacttcacgtacactgcacggtgtcatgcagaacattcgcgacattgtgaatctgaaaaagtccgagttctggaacaagggtggtcctgcctggcagaagattgtggtctgcctggtttttgatggaatcgacccttgcgacaaggacactttggatgttcttgcgacaatcggtgtctaccaagacggcgtcatgaagcgtgacgtcgatggaaaagagactgtggctcacatttttgaatatacgactcaactgtctgtgactccgaatcagcagctgatccgccccaccgacgacggtcccagtacacttcctccggtccagatgatgttctgtttgaagcagaagaacagcaagaagatcaactcccacagatggctcttcaatgcatttggtcgcattctcaaccccgaggtctgtattcttcttgacgccggtacaaagcctggcccgaagtcacttctgtcgctttgggaagccttctataacgataaagatttgggtggtgcttgcggtgagattcacgccatgttgggtaagggttggaagaacctgatcaacccgctcgttgccgctcagaacttcgaatataagattagtaacatcctggacaagcccttggagagttcatttggttatgtcagcgtcttgcctggtgccttctcagcttaccgattccgcgcaattatgggccgccctctcgagcagtatttccatggtgaccacactctttcaaagcaactgggcaagaagggtatcgagggaatgaacattttcaagaagaacatgttcttggccgaagatcgtattctttgttttgagttggttgctaaagctggttcaaaatggcacctgacctatgtcaaggcctccaaggctgaaaccgacgtgccagaaggcgcacccgaattcatttcgcagtgtcgtcgttggctgaacggttcgtttgctgccggtatttattcgctcatgcactttggtcggatgtacaagagtggacacaacattgtccgcatgttttttctgcacatccaaatgttgtacaatatcttctctacggttctgacatggttttccttggcttcttactggcttactaccaccgtcatcatggacttggtcggcacgccgagcgacaataacggtaacaaggctttcccgttcggcaagactgcaactcccattatcaataccatgatgaaatatgtctacttgggattcctactattgcaattcatcctcgcgctgggtaaccgtccaaaaggatcgaagttctcatacctcgcgtctttcgtggttttcggcatcattcaggtctacgtggttattgatgcactgtacctggtggtgcgtgccttcagtggaagtgctcctatggatttcactacggaccaaggcgttggcgagtttctgaaatcgttcttttcatccagcggcgccggtatcattatcattgctctcgctgctacattcggtctctactttgtggcatcttttatgtatcttgacccctggcacatgttcacgtccttccctgcctacatgtgtgtccaatcgtcatacatcaatattctgaacgtctacgctttcagcaattggcacgacgtctcgtggggtaccaagggttcagacaaggcagacgctctaccttccgccaagaccaccaaggatgagggcaaagaggttgtcatcgaggaaatcgacaagcctcaggctgatatcgacagtcagttcgaggcaacggtcaagcgtgccctaacgccctatgtgccaccagtcgagaaggaggaaaagactctggaagactcgtacaaaagcttccgaacgagactggtcacgttttggatctttagcaacgccttcttggccgtttgcatcaccagtgacggtgtggataaattcggcttcacgaattctgctaccgaccggacgcagcgtttcttccaggctttgctgtggtccaacgctgtcgttgccctgttccgtaacatcggagcctgctggttcctgggcaagacaggtttgatgtgctgctttgcccggcgttagaggggcgttcttcgtaatgagagcgattagtggtgcttcgccaacgggtctatcgatggccaagcacttcctggcacattttccatcacaatattgtattttacatatgacgcttgctttgttacctccttttccgttgaagttggctctgtcacggttggatctatgtgcttcgacagggccttatgcactgtgatgtctcgtaaactcttagcgattagaaaaggaactcgatgcattaaaaaaaaaaaaaaaaaa

SEQ ID NO: 9 - DNA, 2748 bp, Aspergillus nidulans
atggcctaccacggctctggtccccagtcgcctggcgagcatacttatgatgacggccatcagctccgcgacctctcacactctaatacctcttacgaagaagaagcctctcatggattgttatccagccaacaaagccctttcgctggccccttcgatgacccccatcagcagcgtggccttaccgcttcacccgtacagcgtccgacgtctggatacagtttgactgagtcttacgctcccgacgccgcataccatgatccgtacagcgccaaccaatcggtctactccggccactcagagaaccctgcagccgcttttggcgttcctggacgtgtagcatcgccttacgctcgtagtgaaacttcgtctacagaagcgtggcggcagcgacaggccggcgctcggcgcggtggaaacgggcttcgtcgttatgccacaaggaaggttaagctggttcagggctctgtcctgagtgtggactacccagttcctagcgccattcaaaatgcaattcaagccaagtatcggaatgaccttgagggcggaagtgaggaatttacgcatatgcgatatacggcggcgacttgtgatcccaacgagtttacgctccacaacggttacaacttgcgtccagcaatgtataacagacatactgagttattgatcgccatcacgtattacaacgaagataaaacgcttaccgctcgtaccctgcacggtgttatgcaaaacattcgcgatattgtcaacctgaagaagtcggaattttggaacaagggtggccctgcctggcagaagatcgtcgtctgtctagtctttgacggcatcgacccttgcgacaaggacacattggatgttctcgccaccgttggtatctatcaagacggtgtcatgaagcgtgacgttgatggaaaggaaaccgtggctcatatcttcgagtataccacccaactttctgtcactccaaaccagcaactcattcggccgacggatgacggacctagcacccttcctcccgtgcagatgatgttctgtttaaagcagaaaaatagtaagaagatcaattcccatcgatggctgttcaacgctttcggtcgtatccttaatcccgaggtctgcattctcctcgatgctggtaccaagcctgggcctaagtctctgctttacctgtgggaggctttctacaacgacaaggatctcggaggtgcttgtggtgaaatccacgccatgttgggcaagggctggaagaaattgctcaatcccttggttgccgcgcagaacttcgagtacaagattagtaacattcttgacaagcctttggagagttcctttggatatgtcagtgtgttgcctggtgccttctcggcttaccgattccgtgccatcatgggccgtcctttggagcaatatttccatggtgatcacactctttcaaagcagctgggcaagaaaggtatcgagggcatgaacattttcaagaagaacatgttcttggccgaagatcgtatcctttgtttcgagcttgtcgccaaagcgggttctaaatggcatctttcgtacgtcaaggcctcgaagggtgaaactgatgtgccggaaggtgctcctgaattcatctcccaacgtcgtcgttggctgaacggttcgtttgccgccggtatctattcgctcatgcacttcggtcgtatgtataagagcggacacaacatcgtccgcatgttcttcctccatctccaaatgttgtacaactggttctcgactttcctaacttggttttctcttgcgtcttactggcttacgacttcggtcatcatggatctggtaggaactcccagttccagcaacggttacactgctttcccattcggtaaaacggcgactccaatcatcaataccttggtgaaatacatctaccttgcgttcctgctcttgcagtttatccttgcgctcggaaaccgtcccaagggatccaagttgtcatacctcgcatctttcgtcgcctttggtattatccagctttatgtagtcgtcgatgctctgtatctcgtcgtccgcgctttcactggaggggctcccatggatttcaatactgatgatggtatcggtgcgttcctgagctcattcttcggatctagtggagctggtatcattatcattgctcttgctgcaacattcggtctttactttgttgcgtcattcatgtatcttgatccttggcacatgttcacgtctttccccgcatacatggccgtccagtcgtcttacatcaacatcttgaacgtttacgccttcagcaactggcatgatgtgtcatggggtaccaaaggttctgacaaggcggatgcccttccttctgccaagactacaggaggcaaaggagaagaagctgttatcgaggaaattgataagccgcaggctgatatcgatagtcaatttgaggcaacggtcaagcgagccctgactccgtatgtgccacccgaggagaaggaagagaagagtctggacgactcgtacaagagtttccgtacgagactggttacgctctggctcttcagtaacggtcttctcgctgtctgcattactagtgagggtttggataagttcggatttacgaacacctctactgagcgtacttcacgtttcttccaagcccttttgtggtctaatgcggttgtcgctcttattcgctttatcggagccacatggttccttggaaagacaggtcttctctgctgcttcgcccgtcgg

SEQ ID NO: 10 - DNA, 3023 bp, Aspergillus niger
atggcctaccaaggcactggtaatcactcgcctcccggctacgatgacggtgggcatcggcttcaggatctaccagccggcaacaactatgaagaagaagcgtctagaggactgctatcgagccaaacgggcccattcacaggtccctttgatgaccctcagcagcgcaatctgtccccggctcggcccacctctggatacagcttgaccgagacatatgctgccgatgcgggttatcatgatccttacagtgcaggtggctcggtttactctgcacagtctggagagaaccccgcgactgcctttggcgtccccggccgcgttgcttcgccctatgctcgtagcgagacctcgtcaacagaggcttggcgccagagacaggctcctggaggtgctggtagtggtggcggcggtggcctgcgccgttacgccaccagaaaggtcaagcttgtgcagggctcagtcctgagtgttgactacccagtgcctagtgctattcaaaatgcaatccaggcaaagtataggaacgacctggagggcggaagcgaagaattcacacacatgcgttacaccgcagccacatgtgatcctaacgagttcacccttcataatggctataaccttcgtcctgccatgtacaacagacacaccgagttgttgattgctattacgtattacaacgaagataagacgcttacagcccgtacgctgcatggtgtgatgcaaaacattcgtgacattgtgaacttgaagaagtctgagttctggaacaagggtgggccagcctggcagaagattgtggtctgcctggtgtttgatggtattgatccctgtgacaaggatgtgctggatgtcttggccaccgttggtatttaccaggatggtgtcatgaagcgtgatgttgatggaaaggaaaccgttgctcatatcttcgaatacacgacgcaattatccgttacccccaaccagcagctcattcgcccgacagatgacggtcccagcacactacctcctgttcagatgatgttctgtttgaagcagaagaacagcaagaagatcaactctcatagatggcttttcaacgctttcggccgtatcctgaaccccgaggtctgcattcttctcgatgctggtaccaagcctggtcacaagtcactcttggccctgtgggaggccttctacaacgacaaggacctcggaggtgcttgtggtgaaattcacgccatgttgggtaagggttggagaaacctaatcaaccctctcgttgccgcccagaacttcgaatataaaatcagtaacatcctcgacaagccgttggagagttccttcggctatgtcagtgtgttgcctggtgctttctcagcataccgattccgtgccatcatgggccgcccactggagcagtatttccatggtgatcatacgctctccaaacagctgggcaagaagggtatcgagggaatgaacattttcaagaagaacatgttcttggccgaggaccgtatcttgtgtttcgagctggttgctaaggctggctcaaaatggcatttgtcatacgttaaagcctcaaagggtgaaactgacgtgcctgaaggtgctgctgagttcatctcgcagcgtcgtcgttggttgaacggatccttcgcagccggtatctattcgctcatgcatttcggacggatgtataagagtggccacaacatcattcgaatgttcttccttcatattcagatgttgtacaacactttctcgactatacttacatggttctctctggcatcctattggcttacaacatcggtcattatggacctggtcggtactcctagcgctagcaacggtcacacaggtttcccctttggcaaaacggcaactcccatcgtcaacacgattgtcaaatatgcctaccttggtttcctgctcctccagttcattctcgctttgggtaaccgcccgaaaggttcccgtttctcgtacctggcatccttcgttgtcttcggtatcattcagctctacgttgtcgtcgatgcactatacctggtagtccgcgctttcagtggcagtgctccgatggactttgataccacgcacggtgttggtgcgttccttggttcgttcttcgggtcgacaggtgccggtatcattatcattgcgcttgctgccactttcggtctctacttcgtggcttcgttcatgtacatggacccttggcacatgttcacctcgttccctcagtacatggccgtgcagtcttcttacatcaacattctgaacgtctatgccttcagcaactggcacgatgtgtcttggggtaccaagggttctgataaggcggatgctcttccctccgcgaagactaccaaggaagggggcaaggagaccgtcattgaggaaattgacaagccccaggccgatattgacagccaatttgaagctacggtgaagcgtgctttgacaccatatgtggctcccgtggagaaggatgagaagagtttggatgactcgtacaagagcttccgtacgagattggtgacgttctggatcttcagtaacgctctaatggctgtttgcatcaccagcgatggtgtggataagtttggcttcacaaactctgccaccgatcgtacgtcacgcttcttccaggccctactgtggtcaaacgccgttgttgcgcttttccgcttcatcggagcctgctggttcctgggtaagaccggtgtgatgtgttgctttgcccgccgctagagaaggtgcgcagcataatgaacgaaaagttgtcaacgagaggtgctttgctcatggccggaagaggcctcgtggagttattcttggcacatttttgtcgcaattttgtattctacatacgatgtttattctttgtttcccaggttcggccgtgttttgtttcaggttggatttgcacatttcagagggactgcaggcacgacaatgttttgtagactcttagcgcattagaaatgggatgtattcaagggcgtggaaggcgatcggttgactgtttt

SEQ ID NO: 11 - DNA, 1068 bp, Aspergillus oryzae
gataagacccttaccgctcgtaccttgcacggtgtgatgcagaacattcgcgacattgtgaacctcaagaagtccgagttctggaacaaaggtggacccgcctggcagaaaattgttgtcgctctggtctttgacggtatcgatccttgtgataaggacactttggatgtcctcgccaccatcggtatctatcaggacggtgtcatgaagcgtgacgtcgacggcaaggagaccgtggctcatattttcgaatacacgacccaattgtccgtgacaccgaaccagcaactcatccggcccactgatgatggcccgaccaccttgcccccggtgcagatgatgttctgcttaaagcagaagaacagcaagaagatcaactcacacagatggctgttcaatgccttcggtcgtattttgaatccagaggtttgcatccttctggatgccggtactaagcctggccagaagtccctcctggcgttgtgggagggcttctataacgacaaggatctgggaggtgcttgtggtgaaattcacgcaatgttgggtaaaggctggaagaatctgatcaaccccctcgtcgcggcccagaacttcgagtacaagatcagtaatatcctcgataaacccttggagagttctttcggttatgtcagtgtgttgcctggtgctttctccgcctatcgtttccgtgccatcatgggtcgacccctcgaacaatatttccatggtgatcacactctctcaaaacagctgggtaagaagggtattgagggcatgaacatcttcaagaagaacatgttcttggccgaagatcgtatcctttgtttcgaactggtcgccaaggctggctccaaatggcacttgtcctacatcaaagcctcgaagggtgaaactgacgtgccggaaggtgttgctgaattcatttcccagcgtcgtcgttggttgaacggttcttttgcggccggtctctattcgctcatgcatttcggtcggatgtacaagagtggacataacatcatccgtatgttcttcttgcacattcagatgttgtacaacgttttcaac

SEQ ID NO: 12 - DNA, 2748 bp, Aspergillus terreus
atggcttatcaaggttcggggaatcactcgcccccccattatgaagacggctcccatcgccttcaggatcttccagctggtgcctcctatgaagaagaggcctccagaggattgctgtcgagccaacaaggccctttcaatagccccttcgatgatccgcaccagcgcggtgtctcccctcagcgacccgcttcaggatacagtttgaccgagacctatgccgccgatgctaactacaacgacccctacaatgccgggtctggctcggtctactccggtcattccatggagaaccccgcgactgcctttggtgttcctggtcgtgtcgcgtctccctatgcgcgcagcgagacctcttctaccgaggcatggcgccagcgacaggcacctggaggagcgaacggaggtggtggcggcggcctccgtcgttacgctacgagaaaggtcaagctggtccagggttccgtcctgagtgtggattacccagtccccagtgccattcagaatgccatccaggcaaagtaccgcaacgacctcgagggtggaagcgaggaattcactcacatgcggtataccgccgcgacttgcgatccgaatgaattcaccctccacaacggttacaatcttcgtcccgccatgtacaacagacataccgaacttctcattgcgattacatactataacgaagataagacactcacctcgcgtacccttcatggtgtgatgcagaacattcgtgagatcgtcaacctgaagaagtccgaattctggaacaagggtggtcccgcgtggcagaagatcgtggtggctctggtgtttgacggtattgatccttgtgacaaagatactctggacgtcctggccaccatcggtatctatcaggacggtgtcatgaagcgtgatgtcgacggcaaggagactgtggcccacatcttcgagtacaccacacagttgtctgtgactcccaaccagcagctcatccgccccaccgatgacggtcccagcacgcttcccccggtgcagatgatgttctgtttgaagcagaagaacagcaagaagatcaactctcaccgatggctcttcaacgcgttcggacgcattctcaatcccgaaatttgtatcctgctggatgctggtacgaagcccggccacaagtctctcctggcgctgtgggaggctttctataacgacaaggatctcggtggtgcttgtggtgagatccacgccatgttgggtaaaggctggcgaaacctggtcaatccgctggtcgccgctcagaacttcgagtacaagatcagtaacattctcgacaaaccgctggagagttcgttcggatatgtcagtgtcttgcccggtgctttctctgcgtatcgattccgtgcgattatgggacggccgctcgagcagtacttccacggtgaccacacactctcgaagcagctaggcaagaaaggtatcgagggcatgaacattttcaagaagaacatgttcttggccgaagaccgtatcctgtgtttcgaactggtcgccaaggccggctccaagtggcatctgtcttatgtgaaggcctccaaggccgaaactgacgtgcccgagggtgccgccgaattcatttctcagcgtcgtcgttggttgaacggttcgttcgccgccggtatctactccctcatgcacttcggacggatgtacaagagtggtcataacctggtccgcatgttcttcctgcacattcaaatgttctacaacatctttaatacggtcctgacgtggttctctttggcgtcgtattggcttaccaccaccgtcatcatggatttggtcggaactcccagcaaggaaaacggagagcgtggtttcccctttgggaaggatgcgacgccgatcgtcaacacgcttgtgaaatacatctatctggccttcttgcttctgcagttcattctcgccttgggtaaccgtcccaagggatcccgcttctcgtatctcgcctcgttcgtggtcttcggtgtgatccagatttatgtgctggtcgatgccatgtacttggtggttcgcgctttcagtggcactgctccgatggatttcgtcacggacaagggccttggcgaattcctgaaatccttcttcggcggtaatgctggtcttgtcgtgatcgccctcgccgccaccttcggtctctactttgttgcgtccttcatgtacatggacccgtggcacatgttcacctcgttccccgcctacttggccgtgcagtcgtcctacatcaacatcctgaacgtgtatgctttcagcaactggcacgatgtgtcctggggtaccaagggatctgacaaggcggatgcgctgccctcggccaagaccacgaaagatgaaggcggcaaagatgcggtcattgaggaaatcgacaagccccaggccgatatcgacagtcagtttgaagcgacggtgaagcgtgctctcacgccttacgttgctcctgtggagaaggaagagaagtctctggatgattcgtacaagagtttccgtacccgactggtcacgttttggattttcagcaatgctcttcttgttctttgcattaccagcgacggtctggacaagtttggtttcacgaactccgccaccgaacggacatcgcgtttcttccaggctctgctgtgggccaacgctattgttgcgcttttccgtttcatcggtgcttgttggttcctgggcaagactggcctgatgtgctgcttcgcccgccggtag

SEQ ID NO: 13 - DNA, 4876 bp, Botryotinia fuckeliana
ctgaaaccaaagcgcaagaacagccaatgatcgcacatgattatcagaccaagacgctggttaaaggggttaagcttgcacttcatcgcattgtactctgtaaacgcgactcttcccaggagacagttaatattacacgacatgccatattccatctgccatctgccatctgccatgaaggcgttgtgaagtacgagcaagtccgtgaaggggcaaagagaagaccttgggagaggagcgtcgacacgatccaagccttcctcgtcccttcatcgtgtttgccagaatacgagacagttgtagatacgtatacgcaattcttgaacgtcaagaatgaagattggacggatgaaacccagccgcagcatggagatggggagatgggtaatgatggtgcatatagatttacaattagaatcaataaactttccaaggcgaggcgaggcgcagtcaacatacagattcaccatcttcacacattcacattcacattcacaataataataataataagattctggcagtccaccgatgcaacacctttccatcttttcattggttcaaatctctttattccacctcatttcgccttgcttacgatcaaaaatcggtaaagagctctccagttgctttcagggttccgaataccaaaaaatcattgaagggatttgaaaatagcggagcccaagacaacaaactaaatcataaggaatccattccatccctcctatttttttattgacttcaagaatctgaaacagggttgcttttttattaccctttcggagcctttcttcatatcttcaccacttcaccacttcactttttgagaggagaggattcatccaccattcttttcttcttcgacttcttcttctcatcctctcttcctcaccttggtaccatcgctggtgctttacattttgactgcgtgttctattcgtgaatcagaataaagaatttcgggtcgaactacattcactcttttgcttcgcttgccaaggagagggtcgattcgatctatctgaccgtccgttcctgaagcccacggattgacaccgccatacgagaatatacctctgaatcttggacacaaccaacactcctcttttgttccatttctcatccatcaaggattgataaaatctcaaagattttgtcagtattgatactacacttaacatttgtataatctcgatcactcaagaaggggttcttgattattttctacaaccatggcgtactctggaaacggaggctatgatgagcataagctccaagaccttccacctggagggggcaacgtaagttctaggacttcttttatctcgcagatcgtggaaaacctttctctaaccatcactcttgcagtaccatcaccctcaagatgaagaggaaggagctttacctttactcgattctggaggacatggcggcccattcaacagcccttacgactctcactcccaaggaggccttcgagcgaatactcctccagtcagacctgtttctgcctacagtcttacagaaacgtatgcgaacgatccacaaccatacagcagcgattacaactcatcccacacatacaatgagcagttagaagataacccatacccacaaaccgacactcctttgtcaagagccgggactacctccacagaggcatggagacaacgacaagcccctcaggctggaggtctcaaacgttatgctacaagaaaggttaagcttgtccagggaagcgtcttgagtgtcgatcatccagtacccagtgctatcaaaaatgcaattcagcaaaaatacagaaatgatttggagggtggcagcgaggaattcacacatatgcgttacaccgctgcaacttgcgatcccgatgaatttactctgaaaaatggttacaatctacgacctgccatgtacaatcgtcatactgagttgctcattgccgttacctattacaacgaagacaagcagttgactgcacgtactcttcacggtgtcatgcaaaacatccgtgatattgtcaacctcaagaaatctgatttctggaatgtcggcggaccagcatggcaaaaaattgttgtctgccttgtttttgatggtatcgatccttgcgacaaagacacactcgatgttcttgctacaattggtatctaccaagatggtgtcatgaagaaagatgttgatggaaaggagactgttgctcacgttttcgagtacacaacacaactttcggttactgccagtcaacaacttatccgcccaaccgagggtgatgccaactgtcttcctccggtgcaaatgatgttttgcttgaaggcaaagaacacaaagaagattaattcccatagatggctgttcaatgcatttggtcgtctccttaaccccgaagtttgcatccttttggatgccggtacgaagccaggacctaaatcgttgttgtctttgtgggaaggtttctacaacgacaaagatctaggaggtgcttgtggagagattcacgctatgttaggaaaggtaaaacaaaattactgctttattttgacctagatgtgctaacgcaaacacagggaggcaaaaagcttctgaacccgcttgttgcaggtcaaaacttcgagtataagatcagtaacattcttgacaagcctctagagagttctttcggatatgtcagtgtgttgccgggagctttctctgcataccgattccgagctattatgggacggcctcttgaacaatacttccacggagatcacactttgtccaagattcttggaaagaagggtatcgagggaatgaacattttcaagaagaacatgttcttggccgaggacagaattctctgtttcgagcttgtagccaaggctggtagcaagtggcatttgacttatatcaaggcagctaaaggagaaactgatgtacctgaaggagctgctgaattcattggtcaacgtagaagatggcttaacggttcctttgcagcaggaatgtattccatcatgcatttcggcagaatgtaagtttattcgtgacggcgtattctgaggttcaataactaacgttttttacaggtacaagagtggtcacaatattgtccgcatgttcttcttgcacattcaattcttatacaacgtcttctccaactttctcagttggttcatgttatcttctttctggctcactactactgttattatggatcttgtcggtacccctactgctgcttcggacactactgcccttcaccatggctggcctttcggtgatactgctacccccatcatcaacacgattctgaaatatctctacttgggattcctactcgttcaattcattctggctcttggtaatcggcctaagggatccaaggctacttatattgtctcctttgtcgtttttggtgttatcaatctctacgtccttgttctatccatgtatctggtcgttcgtgctttctcgtcaggagatagtctcgatactagtagtgcgaaagatttctttgagagtttcttcggagatagttcgagttccggagctggtatcattattcttgctttagctgctacatttggattgtacttcgttgcatccttcatgtatatggatccatggcacatgttccattctttcggaccgtacttgttgctcatgtcatcttacatcaacattctcatggtgtacgctttcagtaattggcacgatgtttcttggggtaccaagggatctgataaagcagaagctcttccgtcagctaaaactacgaaggttgatggtaaagcagcagtcattgaagaaatcgacagaccgcaagaggatattgatagtcagtttgaggcaactgtcaagcgtgctcttagtccatttgttcctgaagttgaagatgagagtaagaccttggaagattcttacaaatctttcagaaccaagcttttgatctcttgggtattctcaaacgcgttgttggctgttgctatcactagtgacagtgttgatggatttggtttcggagtgagttattctatgcctacaatagttgaatttcctagctaacattatgttcagaatactgcatcaataagaactgctaagtttttcgaaattttgctttactcaacggctttcttggcacttattcgattcctcggatgttcttacttcttgttcaagtctggtatcatgtgctgcttcatgagacgttaaacaagacttatatcatacatactctagaaggaaatatcggtactcgtaacattaaaaggttatgagtaatagatgtttctttttcacaaaattgggggggggggggcggaaaggaggatggaccctttatacggagcgtgagcacctatcattggaaaggaaacagcgcgtgaatctacatcaagcaaccatttttgcatttttgcttcacatatgggagttttcagattttttcttcttcctaggcggtctctctatattgcatgtttgagtaggcgtttccgtttaatactattgaatacccttatgaatgaataatcattcgtatctattgagctagatgacatctttcatgaagaatccaatgtgcactgcgtcaaaccatgagaaatttgcgtaaatgtttataatgatttgaatgtaccaactgaattgagaactttagatggtctgaatgcacagaatgatttgagtatattagatactttgaatacacaaaatgatttgactacattagagactttgaatgtatcaactgaactgagtatgttagagagtctgaatatatcaactgagctgagtgagtatattagagagtccgaatatacagaatgatctgaatattttagagaatttgaatgtatcaattaaaccaagtatattacaggctctggat

SEQ ID NO: 14 - DNA, 4876 bp, Botryotinia fuckeliana; identical to SEQ ID NO: 13

SEQ ID NO: 15 - DNA, 2721 bp, Chaetomium globosum
atggcataccacggaggccggggagacggctacgagggccacccgatgcaggatctcccagcacatcacggccagcacgacgatgaatcgcaggccgcactccttaaccagaaccaggcatacgaccaagatcgcctgggcgcccacactccccccgtccgccctgtctcggcatacagcctgacagagtcgtacgctccgaatgcgcaaacaacacgcatcggcgtcacccctcctccccccggcggcggcacagaatatggcggtggaccgggctacccccagtcgcagttctcggccgacccggcctacaggatgtcctcggtagatacagacgagagctgggttgcccgtcagcaacccaacgccgcgcccaccggcggtctcaagcgctacgcgaccagaaaggtcaagctcgttcagggttccgtcctgagcatcgactatcccgttcccagtgccatccggaatgccgtccaacctcgctaccgcgacgaagagggtaacaacgaagagttcttgaagatgcgttacacggccgccacctgcgaccccaacgatttcactctcaagaacggttacgatttgcgtccccgcatgtacaaccggcataccgagcttctcatcgccatcacctactacaacgaagacaaggtcctgttgtcgagaacgctgcacggtgtcatgcagaacatcagggacattgtgaacctgaagaaatcgtctttctggaaccgtggcggccctgcctggcagaagatcgttgtgtgcttggtcttcgacggtattgagaaggtggacaagaacgtgctggacgtgctagccacgatcggtgtctaccaggacggtgtggtcaagaaggatgtcgacggaaacgagacggtcgctcatattttcgagtacacgacccagctctccgtcacgccgaatcaacagctcatccgtccctcggacgacggcccgaacacgttgccccccgtgcagttcattttctgcctcaagcaggcaaacagcaagaagatcaactcgcatcgctggctgttcaacgcttttggccgcatcctgaaccccgaggtctgcatcctgctcgatgccggtaccaagccgagccccaagtcgctgctcgccctctgggagggtttctacaacgacaaggatctcggtggtgcttgtggtgagattcacgccatgttgggcaaggggggcaagaaactcatcaacccgttggtggccgtgcagaacttcgagtacaagatctccaacattctggacaagcctctggagagtgctttcggttacgtcagtgtgttgcccggtgctttctcggcctaccgtttccgagccattatgggccgcccgctcgagcaatatttccacggtgatcacaccctgtccaagattctgggtaagaagggtatcgagggcatgaacattttcaagaagaacatgttcttggccgaagatcgtattctctgcttcgaactggtcgccaaggcgggccagaagtggcatctgagctacatcaaggccgccaagggcgagacagacgtgcccgaaggcgctcccgagttcatcagccagcgtcgtcgttggctgaacggttccttcgccgccagcttgtattccctcatgcatttcgggcgcatgtacaagagcggtcacaacatcctgcgcatgttcttcctgcacatccagctcatctacaacattctcaacgtcatcttcacctggttctcgctctcttcgtactggctcacaaccaccgtcatcatggacctcgtcggcaccccggttcccgcttcgaatagtacctcggagcaccacgcctggccctttggcgattcggcaacccccttcatcaacgcggttcttcagtacatctacctggcattcgttatcttgcagtttatcctcgccttgggtaaccggccgaagggttccaagtggacatacatcacctcgtacatcgttttcgccatcatccaggcctacattatcgtcctctcggtgtacctcgtggcccaagccttcgcgaccccgctgagcgagcagatccagctggacagcgcctcgaacgcgctcgaatcgctgtttggtggctcgagcgcggccggtgtcatcttgctcgcgctcatcaccatctacggtctctacttcctggcctcgttcatgtacctcgacccgtggcacatgttccactcgttcccgtactacatgttgctcatgtcgacttatatcaacgtcctcatggtatacgcgttcaacaactggcatgatgtctcgtggggtaccaaggggtccgacaagaacgatgcgctaccgtcagcccaggttaccaagggcgagaaggacgaggtggtcgtggaggaaatcgagaagccgcaggaagatatcgatcagatgtttgagcagacggtccgccgcgccctcgcgcctttcaaggaggacgagaagcccgagcccaaggatctcgaggactcgtacaagtccttcagaaccatgctcgtcgtctcgtggctgttctcgaactgcttgctcgcggtcgtcatcaccagcgacaacttcaactcgttcggcattggccaaaccgccactgcgcgtaccgcttggttcttcaagttcctgttgttcgccaccgccggcctctctctcgtccgcttcatcggcttcctgtggttccttggcaggaccggtatcatgtgctgcttcgcccgccgttaa

SEQ ID NO: 16 - DNA, 2712 bp, Coccidioides immitis
atggcctaccagggcggcggcggtaactcgccaggaggttacggcgaccatcgcctccaggatatgcctccaaatggaagccaataccacctgccgcaagatgatgatgcttcgcgctctttgctgaatcaaggaccctacggtggtcccttcgacgatccccatcagcggaccgcctcccctgccagaccagcttcgagatacagcttgaccgagtcttacgccacagacccacagaacatgagccagtacaatgacccgatgtacggccagcagacggacaatcccgccgctggcttcggcgtgcctggtcgggtagcctccccgtacagccggagcgaaacctcctccacagacgcatggcgacggaggcaagctccccaaggaaacctccgccgctacgctaccagaaaggtcaagctcgtccagggctctgtcttgagcgtggactaccccgtgcccagtgccattcagaatgcggtccaggcaaagtaccgcaacgacctcgaaggaggaagcgaggaatttacgcacatgagatataccgctgctacctgcgatcctaacgacttcaccctgcacaatggctacaaccttcgtcctgctatgtacaaccgccacaccgagctcctgatcgcaattacgtactacaatgaagacaaaatgttgacttctcgtaccctgcacggcgttatgcaaaacattcgcgacatcgtgaatatcaaaaaatccgaattctggaataaaggtggtcccgcctggcaaaagatcgttgtcgctttgatcttcgacggtatcgacccttgcgacaaagacgtgctagatgttcttgctacgatcggtgtttatcaagatggcgtcatgaaacgtgatgttgacgggaaggagaccgttgcccatattttcgaatacaccacacaattatccgtcaccgcaaaccagcagctcatccgtccccatgatgatggcccgtcgactctcccacccgtccagatgatgttttgcttgaagcagaagaatagcaaaaagatcaactctcacagatggctctttaatgcgtttggtaggattctcaaccccgagatttgtattctcttggacgctggtacgaagcctggttcgaagtccttgctcgctctttgggaagctttttacaacgacaaggacttgggtggatcttgcggtgagattcacgccatgttgggtaagggatggacaaaattgatcaatccgctcgtcgctgcccaaaactttgaatacaagatcagtaacatcctcgataaacccttggagagttcctttggatatgtcagtgtcttacccggtgctttctctgcataccgattcagagctatcatgggtagaccccttgagcaatatttccacggtgaccacactctttccaagcagcttggtcccaagggtattgagggtatgaacatcttcaagaaaaacatgttcttggctgaagatcgtattctctgcttcgagttggtggccaaggctggatctaaatggcacttgacctacgtcaaagcttccaagggtgaaactgacgtgcccgagggtgctccggaattcatctcccagcgtcgacgttggctgaacggttcctttgccgccagtatctacgccctcatgcactttggtagaatgtataagagcggacataacatcctccgcatgttcttcttccacattcaaatgctttacaacacgtttacggtttttttgacttggttcgctctggctgcttactggcttaccacttctgttatcatggatctcgttggtaaccctaatcaagagggtcagagagccttccccttcggaaacaaagttactcccatcctcaacacggttctcaaatatctataccttggtttcctcctactgcagttcatcctcgccctaggtaacaggccaaaagggtctaaacactcgtacatcacgtcgtttatcctcttcggtcttgttcagctgtacattgtcatcctctcaatgtacttggtcgttcgggcgttctctggaagcgtagatttcgaaaccgacaaaggcgtggacggtttcctgaagtctttcttcggctccgacagtgcgggtatcattgttatcgctcttgcagcaacttttggtctctacttcgttgcctcgtttatgtacatggacccatggcacatgttcacatccttcccggcctatctgctcatcatgtcctcgtacattaacatcctcatggtgtacgctttcagcaactggcatgatgtttcttggggtaccaagggttcagataaggcagatgcattgccgtccgcacaaacgacgaaagaagatggtggcaaagctgccgttatcgaagaaatcgataaaccacaagctgacatcgacagtcagttcgaggcaactgtgaaacgagctcttactcccttcgttgaaccaaaggtcgatgaaaagaaatctttggaggattcttataagagcttccgtactcgactagtagcttcatggattttctcaaatgctttgctcgctgtgctaattacaagcgacagcgttaataagcttggttttacatcccaagccacagatcgaaccgccaatttcttccgagctcttttgtgggctacggccgctttgtctttgatccgtttcatcggagcctgttggttcttgggcaaatcaggcattatgtgctgtttcgccagaagatag

SEQ ID NO: 17 - DNA, 3538 bp, Coccidioides posadasii
gacacctctctctctttctctctctctgcctctctcgttcagctatctaggcccctcttcaccttctccctcttttttcctgctttctttttttttcttttttttgttgttgttgctgttgtttgttccactaccttccatatcatccacccctttgtctgcacgtcacttcgtctgcggcttggacgttcctccattcgcccttcgccctgtgaccctcgaacaactacctggcttcgctgtcagcaggccttgtccttcccactaccaatcctgacctctcgctcccgcaacctacccttggccgacactggttccccatacctctccctctgatcgttccttgcgatcttcgacaatggcctaccagggcggcggcggcaactcgccaggaggttacggcgaccatcgcctccaggatatgccttcaaatggaagccaataccacctgccgcaagatgatgatgcttcgcgctctttgctgaatcaaggaccctacggtggtcccttcgacgatccccatcagcggaccgcctcccctgccagaccagcttcgagatacagcttgaccgagtcttacgccacagacccacagaacatgagccagtacaatgacccgatgtacggccagcagacggacaatcccgccgctggcttcggcgtgcctggtcgggtagcctccccgtacagccggagcgaaacctcctccacagacgcatggcgacggaggcaagctccccaaggaaacctccgccgctacgctaccagaaaggtcaagctcgtccagggctctgtcttgagcgtggactaccccgtgcccagtgccattcagaatgcggtccaggcaaagtaccgcaacgacctcgaaggaggaagcgaggagtttacgcacatgagatataccgctgctacctgcgatcctaacgacttcaccctacacaatggctacaaccttcgtcctgctatgtacaaccgccacaccgagctcctgatcgcaattacgtactacaatgaagacaaaatgttgacttctcgtaccctgcacggcgttatgcaaaacattcgcgacatcgtgaatatcaaaaaatccgaattctggaataaaggtggtcccgcgtggcaaaagatcgttgtcgctttgatcttcgacggtatcgacccttgcgacaaagacgtgctagatgttcttgctacgatcggtgtttatcaagatggcgtcatgaaacgtgatgttgacggaaaggagaccgttgcccatattttcgaatacaccacacaattatccgtcaccgcaaaccagcagctcatccgtccccatgatgatggcccgtcgactctcccacccgtccagatgatgttttgcttgaagcagaagaatagcaaaaagatcaactctcacagatggctctttaatgcgtttggtaggattctcaaccccgagatttgtattctcttggacgctggtacgaagcctggttcgaagtccttgctcgctctttgggaagctttttacaacgacaaggacttgggtggatcttgcggtgagattcacgctatgttgggtaaggggtggacaaaattgatcaatccgctcgtcgctgcccaaaactttgaatacaagatcagtaacatcctcgataaacccttggagagttcctttggatatgtcagtgtcttacccggtgctttctctgcataccgattcagagctatcatgggtagacccctcgagcaatatttccacggtgaccacactctttccaagcagcttggtcccaagggtattgagggtatgaacatcttcaagaaaaacatgttcttggccgaagatcgtattctctgcttcgagttggtggccaaggctggatccaaatggcacttgacctacgtcaaagcttccaagggtgaaactgacgtgcccgagggtgctccggaattcatctcccagcgtcgacgttggctgaacggttcctttgccgccagtatctacgccctcatgcactttggtagaatgtataagagcggacataacatcctccgcatgttcttcttccacattcaaatgctttacaacacgtttacggttttcttgacttggttcgctctggctgcttactggcttaccacttccgtcatcatggatctcgtcggtaaccctaatcaagagggtcagagagccttccccttcggaaacaaagttactcccatcctcaacacggttctcaaatatctataccttggtttcctcctactgcagttcatcctcgccctaggtaacaggccaaaagggtctaaacactcgtacatcacgtcgtttatcctattcggtcttgttcagctgtacattgtcatcctctcaatgtacttggtcgttcgggcgttctctggaagcgtagatttcgaaaccgacaaaggcgtggacggtttcctgaagtctttcttcggctccgacagtgcgggtatcattgttatcgctcttgcagcaacttttggtctctacttcgttgcctcgtttatgtacatggacccatggcacatgttcacatccttcccggcctatctgctcatcatgtcctcgtacattaacatcctcatggtgtacgctttcagcaactggcatgatgtttcttggggtaccaagggttcagataaggcagatgcattgccgtccgcacaaacgacgaaagaagatggtggcaaagctgccgttatcgaagaaatcgataaaccacaagccgacatcgacagtcagttcgaggcaactgtgaaacgagctcttactcccttcgttgaaccaaaggtcgatgaaaagaaatctttggaggattcttataagagcttccgtactcgactagtagcttcatggattttctcaaatgctttgctcgctgtcctaattacaagcgacagcgttaataagcttggttttacatcccaagccacagatcgaaccgccaatttcttccgagctcttttgtgggctacggccgctttgtctttgatccgtttcatcggagcctgttggttcttgggcaaatcaggcattatgtgctgtttcgccagaagatagtcaaggtggcttcatctttcggactctcttttgttttacgacctgtgttctttcagcctggaaaattgacgccagtaatctgctttcccgccctgacatgatgatattccctacacaaaatatggtcctgttcaatatccaccaatattctgccatgcccctttttcttgtttgtttcaccggtaactatttgtgcctgtattctattttagatgatgggttatcctttctctttgtctctgctattcctgctcattactctgggatttcccaaagtctaggtaatgttggtagcttcatatctttttgctttcccttccagataaccctgtttccacgcattaatgttttggcttttgcttactataccttgggctacttggttccctcctatattacccaatgtctgtggcatgttctatgagaccccatggcaatgtgagttccagacagagtgtttctcaaaat

SEQ ID NO: 18 - DNA, 4186 bp, Emericella nidulans
gaattcggggccgctcctccctcagccctggcgctttttccacgttcctgctcgacctgcgcctctccctcttcagctttggaccctcacgcttcctcccgctggtttttatttctgattgctttctctcgctttcatctcgccttttcatcacttcactttagcccatctttatttttttattttcctgaccgtgccgcgtggtcctataacgcgtgctcaggtgtttgaccttcctaagtcgggacaaaacctcgttctcgtttctttgataccccttccttcacgtccttagcgttctgcttccagttgtatttgcttgacctccgaccaagcccagttcgcagatactgccgtctattcgcacatactaccagtttaaccatggcctaccacggctctggtccccagtcgcctggcgagcatacttatgatgacggccatcagctccgcgacctctcacactctaatacctctgtgggatttcctcgcagttcctgttcgttagattctagctaacgtgatgctcgcttgttagtacgaagaagaagcctctcatggattgttatccagccaacaaagccctttcgctggccccttcgatgacccccatcagcagcgtggccttaccgcttcacccgtacagcgtccgacgtctggatacagtttgactgagtcttacgctcccgacgccgcataccatgatccgtacagcgccaaccaatcggtctactccggccactcagagaaccctgcagccgcttttggcgttcctggacgtgtagcatcgccttacgctcgtagtgaaacttcgtctacagaagcgtggcggcagcgacaggccggcgctcggcgcggtggaaacgggcttcgtcgttatgccacaaggaaggttaagctggttcagggctctgtcctgagtgtggactacccagttcctagcgccattcaaaatgcaattcaagccaagtatcggaatgaccttgagggcggaagtgaggaatttacgcatatgcgatgtaagctcatcctccaacggccttggcagctggaatcgaaactaaaagcatttgactagatacggcggcgacttgtgatcccaacgagtttacgctccacaacggttacaacttgcgtccagcaatgtataacagacatactgagttattgatcgccatcacgtattacaacgaagataaaacgcttaccgctcgtaccctgcacggtgttatgcaaaacattcgcgatattgtcaacctgaagaagtcggaattttggaacaagggtggccctgcctggcagaagatcgtcgtctgtctagtctttgacggcatcgacccttgcgacaaggacacattggatgttctcgccaccgttggtatctatcaagacggtgtcatgaagcgtgacgttgatggaaaggaaaccgtggctcatatcgtatgcacatttttgcgaccgtttccccctgaagcccccagctaataatcattagttcgagtataccacccaactttctgtcactccaaaccagcaactcattcggccgacggatgacggacctagcacccttcctcccgtgcagatgatgttctgtttaaagcagaaaaatagtaagaagatcaattcccatcgatggctgttcaacgctttcggtcgtatccttaatcccgaggtctgcattctcctcgatgctggtaccaagcctgggcctaagtctctgctttacctgtgggaggctttctacaacgacaaggatctcggaggtgcttgtggtgaaatccacgccatgttgggcaagggctggaagaaattgctcaatcccttggttgccgcgcagaacttcgagtacaagattagtaacattcttgacaagcctttggagagttcctttggatatgtcagtgtgttgcctggtgccttctcggcttaccgattccgtgccatcatgggccgtcctttggagcaatatttccatggtgatcacactctttcaaagcagctgggcaagaaaggtatcgagggcatgaacattttcaagaagaacatgttcttggccgaagatcgtatcctttgtttcgagcttgtcgccaaagcgggttctaaatggcatctttcgtacgtcaaggcctcgaagggtgaaactgatgtgccggaaggtgctcctgaattcatctcccaacgtcgtcgttggctgaacggttcgtttgccgccggtatctattcgctcatgcacttcggtcgtatgtataagagcggacacaacatcgtccgcatgttcttcctccatctccaaatgttgtacaactggttctcgactttcctaacttggttttctcttggtaagtcatgcagctgcctactcacttgttgcgaaattctgacattggctacagcgtcttactggcttacgacttcggtcatcatggatctggtaggaactcccagttccagcaacggttacactgctttcccattcggtaaaacggcgactccaatcatcaataccttggtgaaatacatctaccttgcgttcctgctcttgcagtttatccttgcgctcggaaaccgtcccaagggatccaagttgtcatacctcgcatctttcgtcgcctttggtattatccagctttatgtagtcgtcgatgctctgtatctcgtcgtccgcgctttcactggaggggctcccatggatttcaatactgatgatggtatcggtgcgttcctgagctcattcttcggatctagtggagctggtatcattatcattgctcttgctgcaacattcggtctttactttgttgcgtcattcatgtatcttgatccttggcacatgttcacgtctttccccgcatacatggccgtccagtcgtcttacatcaacatcttgaacgtttacgccttcagcaactggcatgatgtgtcatggggtaccaaaggttctgacaaggcggatgcccttccttctgccaagactacaggaggcaaaggagaagaagctgttatcgaggaaattgataagccgcaggctgatatcgatagtcaatttgaggcaacggtcaagcgagccctgactccgtatgtgccacccgaggagaaggaagagaagagtctggacgactcgtacaagagtttccgtacgagactggttacgctctggctcttcagtaacggtcttctcgctgtctgcattactagtgagggtttggataagttcggatttacggtatgttttggctgcgccctatctattattcgaagtgaaactgacaggattcaacagaacacctctactgagcgtacttcacgtttcttccaagcccttttgtggtctaatgcggttgtcgctcttattcgctttatcggagccacatggttccttggaaagacaggtcttctctgctgcttcgcccgtcggtaagagcatgctttgcctaatggaaagtcaagcacgggaggccttgcaattgtatgtattgcatgggtccgaggagttattcttggcacattttgttttgatattgtactctacatatgaatgctcaaactctgtttcttcgttagccagtacgcccgctcaaatccttaggataggggcacaattctcgctattatgtagacttttgtagttagattcaatggggacctgaagcgtgatcgcacctgcatagcaatttagtatctccctttactctaatcccgtactgtagaggcgatggcttgtgtacaaggagtcaggctacggctccaactatttgctcagctatgtccgtatgcaaggtccagggtgcttttatatttgtggctttgcgtttcatctactttcttaaatcctgaactcactcctgccagcgaaggtcttcgttgtcaaaggtgattgttgacccagccttaagtggcaaggaaactagtaatcgcgccgaaccccacccaaccttcacttcccctcgtagagcctcagcatccaacttctcctccgcagcaaccccagttttctctcttgtttcggtcctggtggcagcaccttcgtcggtcaatattcaccatgctaaaaatctggtctatggtatgcactctccccttctgcaacctagactggatgccagtcaacccagcaaacgacgtctaaccgcttcgcctcgcaacagaaacaacagcagcagcaagctgaaaatgctgaaggcgc

SEQ ID NO: 19 - DNA, 4940 bp, Exophiala dermatitidis
  misc_feature (485)..(485): n is a, c, g, or t
gatctggtcctgcaataatgatcattgagcgtgtctcggaaggattgctaccagtgtccagcggtcgtcagcgacatctgtcggcgggccactattgactgccatggcagaatagacgttctgacagatcaaatcgctcaccacacagtcaaaagttgcaagtttctctgtttggattgcttattaacctctgcgtggtaatagagtatcctatgctcgttcgacacctgttggtagtatatcttgctcgagattcaagtaagaccctcccgatcttaagtcaggccaagcgattatccatcaaagtcagatagtaccttactttcgtgtgttcgttttctggaatcggttctccgttgcatctccatcgtgaagtgaaatatatcccttacagtgttagccgtgtctctcatgtgtgcagtggcagaaattacggcgagccaacaactagtactggctatctggcacgttatctcgccccgttnacaagcacctgagccgtcgaatcgaccgttatccaaatttttgccagcctcgtactaatataaaggggatcatgcacagtgcattgcacagccatgcttctaaaaacatctaccaaggcgttacaacgttgtactgtgtggtgttcacctttcagttgtctgggattcaggaacaaatacaagtggcgttatagacctatggacagatgttgtttccttgccagtgctagccaacgagaggcacaccacagaaggacttccgtcaatgtacctggtacctgaatactacccgacatgcccatccaaagcatgctgtccccacgccaccaacaactgcattgcggagaatcaataggatatccatatactccttttctgtggcgcgcaccacgcaatgagcgggtcagggagacggttagaccctggtagttgtcccaaggaagccatccgagtcgcacaactgaaggaaacagcagtctttgagctggatcctccagtcctgctctagtaccctaggtatgttgcgtttgacagtatcgtggtacaacccagtcagcttcatgccttgcccttcagatactgcacagtggtaccttagtagggtggtaataatagtgagggccactgattgtgggggcctgagcctgccgcgagccgccagccacaattgaagctgagcgcagatccgcagcaaaccacccaagatgtcaattccaccctgatcctgcacagccctggctcccaagcttccaagcctcctaagactgtgtctcgtgacgtacgagaacgatgaatggttctctatgcgtgtttggaagcccagtagttgcagtgggaacgaggcgccgaaccactgacagggcgaaaccgccgattgggccagtcgtcaagcgacagtggcagcgttgtcccagctacattttgaatgctcagctggcagggcctcagggggctgtcgctgatgattcgcaactctgcatgcatccatctggcaagggttcaaagaaaacctgaaacgcctgtcagtcctctcgtccttgtctcgcctggaaagtcttgtcctatgctcaccgtgcttcctatgttgtgaattctttgtccttgtccgctctacacttcactcccgcatccgtctcacgcccaccttgaacatacttcatcactccctcactgctgcaacctgcggctgggagatatcgcctgaaccaagtcggccctggtggtcatcttgataaattgtcccttatcatcaccatactagtatttaccctctgtcgctgatcaaccgcccattattctggcgaccccatcgtttgcccgatcctgagcctgtttcgagggcatactactcgcagttgcgctcggagacatggcgagccaatatcccggccatcagctagacgacattccctcgacaaatgtatggcaatgcaggtccaacttttgcagccattatatactgacgttgtgtaggtctatcggcctcctccccgtcatgaagacgatgaagcagaacatgctctactccaccaaaactccgcatatcagtcccaatatgacgaccctcactctcgacctctgacgccggggcaagaatcagtctacaccttgaacgagtcctacgtaggaggggatccttcaaaagtgcccgtgaccagttacaatccccaatacactcaaccttatggccaaggctatggtatgaacaattcgcgtccaggttttcctaccccgggccctcccgaccctattgaccggacggattcaaccgaagcgtggagggagagacaagcgccgggattcggcactatcaagagatatgctacgaggaaagtcaaactggtgcagggtagcgttctgagcattgattaccctgttcccagcgccattcagaatgccattcaagcaaagtaccgcaatgacctagaggggggcagcgaagagttcacacatatgcggtacaccgcggcgacatgtgatcctgatgatttcaccttgaagaatgggtacaatctgcgaccagccatgtacaaccggcataccgagttattgatcgccattacatattacaatgaggataaggtcttaacggcccgcaccctccacggtgtcatgcagaatatccgggatatcgtcaacctgaagaaatccgagttctggaacaagggcggtccagcgtggcagaagatcgtcgtctgtcttgtgtttgacggcatcgatccctgcgacaagaatactctcgacgttttagccacgatcggagtctaccaagacggggtcatgaagaaggatgtcgacggcaaggaaactgtggctcatatctttgaatacacaacccagctttccgttactgccaatcagcaactcattcggcccaatgacaacgacgcgacttccctaccaccagcacagatgatattttgcctgaagcaaaagaacagaaaaaagatcaattctcatcgatggttattcaatgctttcggccgcatcttgaatcccgaagtctgtatcttgctcgatgcaggaaccaaaccgggctcgaagtcgctgatggcactgtggcaggcgttttacaatgacaaagacttgggcggtgcttgtggtgaaatccatgccatgttgggacccggcggcgtttttggaaggaagcttttgaaccccttggtggcagcacaaaatttcgagtacaagatcagcaacatcctcgacaagcccctggaaagctcgttcggttatgtcagtgtcttgcccggtgcattctctgcctatcgcttcagagctatcatgggtcgccctcttgaacaatatttccacggtgatcacactctttccaagacactaggcaagaaggggatcgaaggcatgaacattttcaagaagaacatgtttttggccgaagatcgtattttgtgctttgagctggtcgccaaagccgggtcgaaatggcatctgtcctacgtcaaagcctccaaagctgaaacagatgtgccagaaggccctcccgagttcatcggccagcgtcgacgttggttgaacggctcctttgctgcatccatgtactgtttgatgcatttctcgcgcatgtacaagtctggtcataacttgattcggatgtttttcctccacatccagatgatctacaacattgtttcggttttgctgtcctggttctccctcgcctccttctggctgacgaccaaggttttgatggatctcgtgggtcaacccagtaccagcaatgataacgcggccttcccgttcggcaacacagcgacgccaatcatcaacacaattcttcaatacttgtacctggcgtttctgctcttgcaattcatcctggccctgggaaatcgacccaagggttcgaaagtcgcttacatcatctcattctgtctcttcggcctcattcagctctacgtcatcgtattgtcgatgtatctggtggtacgagccttcaccaccaagaatgggactgacatcgttacgaacgaaggggcgaatgagtttgtcaagtccttcttcgcgtcgaccggccccggaattgtcatcattgcccttgccgcaacatttggactgtactttgttgcctccttcctatacatggatccgtggcatatgtttacgtccttcgcccagtacctgctcctcatgccatcattcatcaacatcctgatgatctacgcttttagtaattggcatgatgtgtcttggggaaccaagggctcagacaaggccgatgttctgccttcggcacagaccaagaaggacgaaaagagcaagactgcagtcgtcgaagaagttgataaacctcaagcagacattgacagtcagtttgaggcgactgttcggcgtgctttagctccttacaaaccacctgaggaaaaggaagagaagactttggaagactcgtacaagaacttccgaactcgactggtggccacttggatcttttcgaatgctcttctggctgttgccatcaccagtgacagtcttgatcgatttggatttacggtaagataatgactgttcccatttccacgcgtcctaacattcttatagtccgagccacttcgcggaccagccatttcttccaggcgcttctgtggactactgcgaccttgtctttgattcgtttcctgggatgctgttggtttctcggaagaactgggttgttgtgctgcttcaacagacgataagtcgagtgtttcgattttgcattgcaacgtgttctcaagagcatatcggacgtagagaatcgtggcctgaagctgcttacggatgtcgaaaaataaaagcatcgtgtgtctgagcatatggaaacggatcagctgcgatgttacagaatctccttgtagacgtagtgctccgagtccgagtcgtaatggacgttttaacattccccaaaatcgtggttggccacatcgggagatccactacaactagagcggccgcacc

SEQ ID NO: 20 - DNA, 4561 bp, Fusarium oxysporum
gtgtatacgaggcttgtgcccatgtgtcaccctcccaaaaatagcatcgccctctcgtctgttctgactttttggctgacaggattagcatgatgagagacttctacgtcacagaccacaaacatcaaccaaccaattctgcaaaaggtggcataatatggagccactagttacgcggcggaggtcgatctctctggacctaaccaggatccatgttcttttctcttcccttctctcactgtgtttttctaagcttcacaaagcaagttgacctgtgtcgatgtactgtactgtagcacgccccctctaggaagctctgtccagttttttttcccccgatttttccccctctttctttcttttctccttcttttttgtgtctatcacagaatatcctctcgttttttgtatcgcataacaaaagtcggcatcacatttgacgaaaagagggtttactccgtccatcgtaataaccttttttttttttttcttaccgtccctcgtttaattcccgttttttggcgccgcattgcatcacagcccggcacttccgataacgagctcatcttatcgcatgtcataatcggcagatttacctggggattgttttttgtaaaagaagaaagaagaccacgatatcgtcgcacataataactctcgcttgatcagttattttttggagtcttttttggactgagggcagagaagaagagcgcagtcatgggttttaatccgcaaggccaaggcaacggcccaaactatgatgcgccacgggaaatgcaagatttaccagctggccaagctgtaagttagctctctcaacagtaaacccaacgcaattacacagcgatctaatcttgcgctttctctgcagtaccactttcgcgaatctgacgaaacagccgccgctcgtgtttctcctgtgagcaatccttacgaaccagactatgatcaattgtcccctccccctccgctgggcgcacaacgacccgtgcccgagcagaatgagtcgagccgcgatcttctacacagttcataccaaggcagcgtaggccataacagctttgacggccatagttttggtcacaatagctatggacctggtgcttttgggcattatcctgctgaccagcacggtcgcatgcctgggtctccgggctacgaatacccagagcctgagtacgatgtcgaagcttcgcgtttggcagaatctcgtctctccgtcatgcatcgcgcccctacgatgcaagattggggtcagaatggcgaggctctgtctgttccagactttgcccacggacgccccgactcaacgtaccaggagttcgatgtcgacgagagctggatgatgcgacagcagcagaaccaactcgcaggtggtctcggtcgctcaaagacccgtaaagtcaagctcgttcagggctccgttctcagcatcgattaccccgtgcccagcgccatcaaaaacgccgttgaaccgcgataccgaagcggtcccggaagcatggaggaggagttcacaaagatgcgctacacagctgctacatgcgaccccaacgatttcaccctgcgaaacggctttaacctccgccccaagatgtacaaccgtcatacagaactgctcatcgccatcacctattacaacgaggacaaggtgctacttgcgcgtaccctccacggaacgatgcagaacattcgggacattgtgaacctcaaacgctccaagttctggaacaagggcggtcctgcgtggcagaagatcgtcgtttgtctcgtctttgatggtatcgacaaggtcgacaagaacgttttcgacgtgctcgcgacggttggtatctatcaagatggtgttctcaaaaaggatgtcaatggcaaagaaaccgtcgcccatattttcgagtacaccagccaagtctccgtgacacccgatcaacagctcgtccgtcccgatcccgacaagcctcatcgcaatctcccccccgtccagtttatcttctgtctcaagcagaagaacagcaagaagatcaattcgcatcgctggctcttcaatgcctttggccgcattcttaacccggaggtcgccatcctcattgatgccggaacgaagccggccccccgcgccctgctgtccctctgggagggcttctacaacgatcgtgatctcggcggcgcctgtggagagatccatgtcatgcttggcaagggtggaaagatgcttctcaatccactcgtcgcggtgcagaatttcgagtataagatctccaacgtcctcgataaaccgctcgaaagtgcctttggatatgttagtgttttgcctggtgctttctcggcgtatcgcttccgcgctatcatgggtagacctctggagcagtactttcacggcgaccatacgctctccaaatcattgggcaagaagggtattgacggcatgaacatcttcaaaaagaacatgttccttgccgaggatcgaattctctgcttcgagttagtcgcaaaggccagtcaaaagtggcatctcagctatatcaaggcctccaagggcgagacagatgttcccgaaggcgctgctgagtttatcggtcagcgacgtcgatggctcaacggatctttcgctatgtcgctctattccctcatgcatttcggtcgaatgtatggatcggggcataacctcattcgtctatttttcttgcacatccagttcgtgtataacttggtcaatgtgctgttctcttggttctcgctcgcggctttctacctcaccaccaccatcatcatgaagcttgtcggaacgccccaggttctctcggaataccatggctggccattcggcgatacagccacgccgattgtcaacgtcctgatcaaatacatatacatcgccttcctcgtccttcaattcgtcctcgctcttggaaacagacctaaaggcgcacaatacacctacgtcctctccttcatggtgttcggtctcatccagctgtatcttctcgtcttgactggttatctcgtgtaccgagctttcactggaacgcctattgaggagcagatctccttcgagtccggaaaagccttctttgatagtttcttcggaggcgataccggagtcgcgggactgatcattattgccctcttcaccatttatggtctcaactacatcgcatccttcttatacctcgacccgtggcacatgttccactcgttccctcagtatctcgtcctcatgtccacgtacatcaacatcctgatggtctacgccttcaacaactggcacgatgtgtcatggggaacaaagggctctgatactgccgaagctctgccatcagccatgatcgtcaaggatgagaagggcaaggaagctgtggtcgaggaaattgagcaggaacaggaggatatcgacagcaagttcgagaaggtcgtctggcgagctctcgcacccatgagcgaaatggcagaggaaaagcccgagaagaaggacgtcgaagattcgtacaagtctttccgaactggtcttgttattctctggcttctctgtaatattgttctcatcgtcgttgtcaccacagacgatttcatcactctcggcgtctcagtaagtcactcactctcccttgtcctctataacatactaacgctccgctcagaaagcagcagacgtccgcacgcctacgtatttccgtgttcttctttactcgacagctgtgctgtctattgtacgcttcttcggcttcctttggttcattggacgaaccggcatcatgtgctgcattgcgagacgataaaccggggagagcgttttgtctggtgaaatatcttaatgaactacatacttttggggttacaggagaaaatttcggtgtgatgcttcttttctgagaggttttggatgttgggatgggatgggttttgagttaatagcggcatgcaacgactattacttattggcgttgcaaatcagaggtagattgctctcggattcttaatctaatccgtatttttgtattcgtggattgagccatatgcacgtaaatgtttgacaccaaccctcttcacagatgaagtccggtaaccaacatgaacatctctgggctcgtgaagcatcccgaacttcactgcctttccacttgatctattttcccattgagccagctattgctgaaagtatgttcgtggtcgcctttgaaactatcatatatcgcgcgaacagagtcagcctctagcaaaaccggtcaatgggatcattactcccgtctcccatatgtacaacctagcatctacaacttggacttcagttccagcttgctctcagcctcgtttctctttcgtctccagctctccaacctcggtgccaccatgtcaccccagataaccaaccactgcggatcgaatgctggcaacttgcgtccatatgtcccttgggcaggctctccagcaatattccttagatactcaaagaagctttcgtagtcaggcgcgatagagtagtagtcctttcctcctctcttctcattcacacgttgccgctcccattccagttgctctgggatagagggcagtgccttcg

SEQ ID NO: 21 - DNA, 2709 bp, Gibberella moniliformis
atggcgtacaatggccgtgatcaggagtatggaggacatgctttgcaggaccttcctgctggcggaagccagtatcacctcccccctcaagagaacgacgaggagcagggccgcggtctcttgaactcaggttacgaccaagatcgacttggcgcccgcactccccccgaccgccccgtctctgcttacagtctcactgagtcctatgcccctggagcctcgtcaaccatgcctggccagggacctactggatacggtgatggaggcagctttggtcagtttggtaaccttgacgctgctgcccctttccctcgccccgactctgccttcgaccccgaagacagctgggttgagcgacagcagcagcctcagatgggcggtggtcttggccgctcgaaaacccgaaagattaagctggttcagggttcagttctgagcattgattaccctgttcccagtgcgatcaagaatgctgtccagccccagtatcgcgacgctgagagtggtaccgaagagttccataagatgcgatataccgctgccacctgtgatcccaacgacttcactctcaagaacggttacgatttgcgacctcgcatgtacaaccgacacactgagttgctgatcgccattacatactataacgaagacaaagttcttctcgcacgaacactgcatcataccatgcagaacatccgcgacatcgtcaacctgaagaagtcgaccttctggaacaagggcggtccagcttggcagaagatcgttgtatgcttggttttcgatggtatcgacaaggctgacaagaacaccctggatgtccttgccactgtcggtgtgtaccaggatggtgttatcaagaaggatgtcgacggcaaggagacggttgcccacatcttcgaatacaccagccagctttccgtcacgcccaaccagcagcttattcgacccacaaacgaaggcacacagaacttgccaccagttcagatgatcttctgtttgaagcaaaagaacaccaagaagattaactcgcaccgatggttattcaacgcctttggccgtatcttgaatcctgaggtatgtatcctgctcgatgcaggtaccaagcccagtccccgatctctccttgctctttgggagggtttctacaacgataaggacctgggaggtgcttgtggtgaaattcacgctatgttgggtaaaggggggaagaagctgttcaaccccctcgttgccgtccaaaactttgagtacaagatttcaaacattctggacaagcctctcgagtcttcgtttggttatgtctctgtcttgcctggtgctttctcagcctaccgattccgagccatcatgggccgcccgctagaacagtatttccatggtgatcataccttgtctaagatgcttggtaagaagggtatcgatggtatgaacattttcaagaagaacatgttcttggccgaggatcgtattctttgttttgagctggtcgccaaggctggccagaagtggcacttgtcctatatcaaggctgccaagggtgaaaccgatgtgcccgaaggtgcagctgaattcattagtcaacgtcgacgatggctcaacggttcattcgctgccacactatactcactgatgcatttcggacgaatgtataagtcgggtcataacatcatccgcatgttcttcctccacattcaactcatctacaccactctcaacactctcttcacatggttctctcttggttcttattggcttacaacatccgttatcatggatcttgtgggtactcccaagcctgcgtccggttaccacgcctggccattcggcgacacgggtacacctgtcgtcaatgccctgcttcagtacctctacttagcctttgtcatgctccagttcattctggctcttggtaacaggcccaagggctccaagttcacatacatcgcttccttcatggtcttcagtctcattcagggttacatcttggtcctctcagcctacctggttgttcgtgcttttgacacgcccattggagaccagatctcgttcgcctcgaccgacgctttccttgatagtttctttggcggttcaagcgctggaggtgttattttggtcgcccttatcaccatctatggtctcaattttcttgcctcgttcatgtacctcgatccctggcacatgttccactccttcccctactatctacttctcatgtcgacttacatcaacattctcatggtttatgccttcaacaactggcacgatgtctcctggggtaccaagggttcagacaaggctgaggcacttccctctgcccacgtcaccaagggcgagaagaacgaggttgttgtcgaggaagttgagaaggagcaggaggatatcgacagccaattcgagcagactgtccgccgagctcttgctcccttcaaggaggtggaagaggttgagaaggccgacgttgaggatggctacaagtctttccgaacaggactcgtcgtcacctggttgttcggaaacattctccttattgtctgcattaccagcgacaagtttgataacctcggatggggtgaacctgccacagatcgcaaggcgcattacttccagttccttctgtacgctactgccgtgctctcgctcgttcgttttgccggtttcttgtggttcctgggcaggactggtatcatgtgctgtttttcgagacgataa

SEQ ID NO: 22 - DNA, 2937 bp, Gibberella moniliformis
atgggttttaatccgccaggccaaggtaatggcccaaactatgatgcgccacgggaaatgcaagatttaccagctggccaagcttaccacttccgcgaatctgacgagacagccgccgctcgcgtttctcctgtgagcaatccttacgaaccagactacgatcaattgtccccccctcctccgctgggcgcacaacgacccgtcccagagcagaacgactcgagccgcgacctcctacacagttcataccaagggagcccaggccacagcagctttgatggccacagtttcggccacaacagctatggacctggtgcttttgggcattaccctgctgatcagcacggtcgcatgcctgggtctcccggctacgaatacccagagcctgagtacgatgtcgaagcttcacgtttggcagagtctcgtctctccgtcatgcaccgcgcacctacgatgcaagattggggccaaaatggcgaggctctgtctgttccagactttgcccacgggcgccccgactcaacgtaccaggaattcgatgtcgacgagagctggatgatgcgacagcagcagaaccagcttgcaggtggtctcggtcgctcaaagacccgcaaggtcaagcttgtccagggctccgtcctcagcatcgactaccccgtgcccagcgccatcaaaaacgccgtcgaaccgcgataccgaaccggccccggaagcatggaggaggagttcacaaagatgcgctacacagctgctacatgcgaccccaacgacttcaccctgcgaaacggctttaacctccggcccaagatgtacaaccgtcatacagagctgctcatcgccatcacctattacaacgaggacaaggtgctacttgcgcgcaccctccacggaacgatgcagaacattcgggacattgtgaacctcaagcgctccaagttctggaacaagggaggccccgcgtggcagaagatcgtcgtttgtctcgtctttgacggtattgacaaggtcgacaagaacgttttcgacgtgctcgcgacagtcggtatctatcaggatggcgttctcaaaaaggacgtcaacggcaaagaaaccgtcgcccatattttcgagtacaccagtcaagtctctgtaacacccgatcaacagcttgtccgtcccgatcccgacaagcctcatcgcaatctccctcccgtccaatttatcttctgtctcaagcagaagaacagcaagaagatcaactcgcatcgctggctcttcaatgcctttggccgcattcttaacccggaggtcgccatcctcattgatgccggaacgaagcccggcccgcgcgccctcttgtccctctgggagggcttctacaacgatcgtgatctcggcggcgcctgtggagagatccacgtcatgcttggcaagggtggaaagatgcttctcaatccgctcgtcgcggtgcagaacttcgagtacaagatctccaacgtcctcgataaacctctcgaaagtgcctttggatacgttagtgttttgcctggtgccttctcggcgtatcgcttccgcgctatcatgggtagacctctggagcagtactttcacggcgaccatacgctctccaagtcattgggcaagaagggtattgacggcatgaacatcttcaaaaagaacatgttccttgccgaggatcgaattctctgcttcgagttagtcgcaaaggccagtcaaaagtggcatctcagctacatcaaggcctccaagggcgagactgatgttcccgaaggcgctgctgagtttatcggccagcgacgtcgatggctcaacggatctttcgccatgtcgctctattccctcatgcactttggccgaatgtatggctcagggcataacctcattcgtctctttttcttgcatatccagttcgtgtataacttggtcaacgtcacgttttcctggttctcgctcgcgtctttctacctcaccaccaccatcatcatgaagcttgtcggaacgcctcaggttctctcgggataccatggttggccatttggcgatacagccacgccgattgtcaacgtcttggtcaaatacatatacatcgccttcctcgtcctccaattcgttctcgctctcggaaacaggcctaaaggcgcgcaatatacttacgtcctctcgttcatggtctttggccttatccagctgtatcttctcgtcttgaccggttatcttgtgtaccgcgcattcactggaacacccatcgaggagcagatctccttcgcgtccggcaaagccttcttcgatagtttcttcgggggcgatactggagtcgcgggcctgatcattattgccctcttcaccatttacggtctcaattacatcgcgtccttcctatacctcgacccgtggcacatgttccactcgttccctcagtatctcgttctcatgtcgacttatatcaacatcctgatggtctacgccttcaacaactggcacgacgtgtcgtggggaacaaagggctctgacactgccgaagccctgccttcagccatgattgtcaaggacgagaaaggcaaggaagccgtggttgaagaaattgaacaggaacaggaggatatcgacagcaagttcgagaaggtcgtctggcgagctctcgcacccatgagcgaaatggcagaggaaaagcccgagaagaaggacgtcgaagattcatacaagtctttccgaactggtcttgttattctctggcttctctgcaacattgttctcattgtcgtagttacaacagacgatttcatcacactcggcgtctcgaaagcatcagacgtccgtacgcctacatatttccgtgttcttctttactcaacagctgtgctgtctattgttcgcttcttcggcttcctctggttcattggacgaaccggcatcatgtgctgctttgccaggcgataa

SEQ ID NO: 23 - DNA, 2718 bp, Gibberella zeae
atggcgtacaatggccgtgaccaggagtatggaggccatgccctccaggaccttcctgctggcagtagccagtaccatcttccccctcaagagaatgatgaggagcagggccgtggccttttgaactcgggctacgaacaagatcgactcggcgcccgaactcctcccgaccgccctgtctctgcttacagtcttactgagtcctatgcccctggtgcttcgtccgccatgcccggccagggacctactggatatggcgacactggtggcagcttcggccagtttggaaacctggatgccaatgctcctttccctcgccccgactctgcctttgatcctgaggacagctgggttgagcgtcagcagcagccccagatgggtggtggcggcggccttggtcgttcaaagacccgaaagatcaagctggttcagggttcagtcctgagcattgattaccccgttcccagtgccatcaagaacgctgttcagcctcaataccgtgatgccgagagtggcactgaggaattccacaagatgcgatacaccgctgccacatgtgatcccaacgacttcaccctcaagaacggttacgatttgcggcctcgcatgtacaaccgacacactgagctgcttattgccattacatactataacgaagacaaggttctgcttgcccgaaccctgcatcacactatgcagaacatccgcgatatcgtcaacctgaagaagtcgactttctggaacaagggtggccctgcttggcagaagatcgttgtctgcttggttttcgacggtattgataaggctgacaagaacacccttgatgtacttgccaccgtaggtgtttaccaggatggtgtcatcaagaaggatgtcgacggcaaggagaccgttgcccacatcttcgaatacacctcccaactttccgtcacccccaaccagcagctcatccgacctacaaacgagggttcccagaacctgccaccagttcagatgatcttctgtttgaagcagaagaacaccaagaagatcaactctcatcgatggttgttcaacgccttcggtcgtatcctgaaccctgaggtgtgtattctgcttgatgcgggtaccaagcccagtccccgatcgctccttgctctttgggagggtttctacaacgacaaggatcttggtggtgcttgtggtgaaattcacgccatgttgggtaagggcggcaagaagctgttcaaccccctcgttgctgtccagaacttcgagtacaagatctccaacattctcgacaagcctcttgagtcatctttcggttacgttagtgtgttgcccggtgccttctctgcttatcgattccgtgcgatcatgggtcgtcctctggagcaatatttccatggtgatcatactttgtctaagatgcttggtaagaagggtatcgacggtatgaacattttcaagaagaacatgttcttggctgaggatcgtattctgtgtttcgagctggtcgccaaggctggccagaagtggcatttgtcttatatcaaggctgccaagggtgaaaccgatgttcccgaaggtgccgctgaattcatcagtcagcgtcgtcgttggctcaacggttcgttcgctgccactctgtactcgctgatgcacttcggtcgaatgtacaagtcgggtcataacatcatccgcatgttcttccttcacattcagctcatctacacgactctcaacactatgtttgcttggttctctctcggttcttactggcttacaacatccgtcattatggatcttgtgggtaaacctaatgctacctctggagttcacgcttggccattcggtgacacaggtactcccatcgtcaacgctctgctccaatacctctacctggcctttgttatgctccagttcattctggctctgggtaacagacccaagggttcaaagtttacttatatcgcttcgttcatggtcttcggtctcatccagggttacatcctggttctgtccgcttacctggtcgttcgtgcttttgacacacctattggagaccagatctcgtttgcttcgaccgacgctttcctgaacagtttcttcggtggttcaagcgctggtggtgttattctggtcgctcttattaccatttacggattgaactttattgcctcattcatgtacctcgacccttggcacatgttccactccttcccttactacctggttctcatgtcaacttacatcaacattctcatggtctacgcgttcaacaactggcacgatgtttcttggggtaccaagggttccgacaaggccgaggcacttccctctgcccacgtcaccaagggagagaagaacgaggttgtcgtcgaggaagtcgagaaggagcaggaggatattgacagtcagtttgagcaaacagtccgccgtgctcttgctcctttcaaggaagaggaggaggtcgagaaggccgatgtcgaggatggttacaagtctttccgaactggtctcgtcgtctgctggttgtttggaaacattcttctcattgtttgcattaccagcaccaactttgataaccttggatggggtgaacctgccacagaacgaaaggcgcattacttccagttccttctgtacgctactgccgtgctctcgcttgttcgtttcttcggtttcttgtggttcctcggcaggactggtatcatgtgctgtttctcaagaaattaa

SEQ ID NO: 24 - DNA, 2790 bp, Magnaporthe oryzae
atggcgtatagaggtgctggagggccgggaggcggccgtgactacgatggtcacaacatgcaagacctaaaccctcacagccagtattccaatgtccaattgcctcctgggcacgagcaagaggacgaggcacacaggtcccttttgacccaaggcacaacgctctacgaccacgaccgactcggcgcccacacgcctccagtgcgtccagtctcggcctacagtctcacagagtcctatgccccgaatgctcccaccaccgttcctggctcggccgtcggcgcatctccctcgccatttcagaatgactatggtgtttcgtcgggctaccagggcgcaatgggcggccacgcagacgacggcttccccattggcggcggagacccccagcaaggccacccctacgataccgaggacagctgggtgcagcgccagaaccccaacgccgctccccagggtggtggtctgaaacgttatgccaccaggaaggtcaagctggtgcagggttcagtcctgagcattgactacaacgttcccagtgccatcaggaacgccgtgcagcccaagtaccgcgagcaggagggcaccaacgaggagtttatcaagatgcgatacaccgcggccacctgtgaccccaacgacttcaccctgaagaacggttacgatttgcgtccccgcatgtataacaggcacacggagcttctgatcgccatcacctactacaacgaggacaaggtactgctgtcccgtaccctgcacggtgttatgcagaacattagggacatcgtgaacctgaagaagtcgactttctggaacaaaggcggcccggcttggcagaagattgttgtctgcttggttttcgacggtatcgagaagaccgacaagaacgttctggacgtcctcgccaccattggtatctaccaagatggcgtcgtcaagaaggacgttcacggccaggagactgttgctcatattttcgagtacaccactcagctgtccgtcaccccgagccagcagctcatccgaccccaggacgacggccccaacactctgccgcctgtccagttcatcttctgtctcaaggccaagaatagcaagaagatcaactctcaccgttggcttttcaacgcctttggacggatcctgaaccccgaggtctgtattctgctggatgccggtaccaagcccagctcgaggtcgcttctcggtctctgggagggtttttacaacgacaaggatcttggaggtgcttgcggtgaaattcatgctatgcttggaaagggcggccggaagctgctcaaccccctcgtagctgtgcagaacttcgagtacaagatctccaacattctcgacaagcctctggagagtgcgttcggatacgttagtgtgttgcccggtgctttctccgcataccgcttccgtgccatcatgggacgacccttggagcaatacttccacggtgaccacaccctgtccaagattctgggcaagaagggtatcgagggcatgaacattttcaagaagaacatgttcttggccgaagatcgtattctttgtttcgagcttgttgccaaggccggccagaaatggcacctgagctacatcaaagctgccaagggagagaccgatgttcctgagggtgctgccgagttcatcagccagcgtcgtcgttggttgaacggttcgtttgccgccaccttgtactcactgatgcacttcggaaggatgtacaagagtggtcataacatcatccgcatgttcttcttccacgtccagctcatctacaacatcctcaacgtcatcttcacctggttctctctggcatcttactggcttaccaccaccgtcatcatggatctcgtcggaaacccccaagttggacagaacgctcgcgaaggctggccttttggtaacaccgtcacgccactcttcaacgccgttctcaagtacatttacctggcctttgtcatcctacagtttattctggccttgggtaatagaccgaagggatccaagtacacctacgtcacgtcattctttgtcttctcggtcatccaggcgtatatcctggttttgtctggatacctcgtcgtccaggccttccagacacctatcggcgagcagatcaagaccgacacggccaaggatttcatggatagtatatttggaaagagcggagccgctggtgttattctactcgccttgatcgccatctacggtatttacttcatcgcctcgttcatgtacctggacccctggcacatgttccactccttcccttactacatgctgctcatgtccacctacatcaacattctcatggtgtacgccttcaacaactggcacgatgtttcttggggtaccaaaggatccgacagtaatgaagctctaccctcggccaatattaccaaaggcgagaaggacgaagtcgtcgtggaggaaatcgacaagcctcaagaggatatcgacagtcagttcgaagcaactgtccgtcgtgccctggcacctttcaacgacgaggagaagcccgagcccaaggatctcgaggactcgtacaagtctttccgtacaatgctggttgttctctggctcttctccaactgtctcttggctgttgcgattactagcgataatttcgacgctttgacaaagaaccaaaacacggccaggactgcctctttcttccagttcttgctgttctcgaccgctttcctctctttgatccgtttcatcggattcctctggttcttgggcaagaccggtataatgtgctgcattgcccgtcgctaa

SEQ ID NO: 25 - DNA, 3836 bp, Moniliophthora perniciosa
tggggctctcaactcaaaatcgctccggtaccgatcacgcaaaaagtgcatagccgcatcagaaatttcataaggcgcagtcctttttctaacacacccccaccatcttgcccttgcctcgctttctgtcacgactcttgttgcttaattctttccttagctttcagtttttttcttcctttgactactatggcgaatcgcccgccactcccttcaaatgcttctagctctacagtcaatgatccttatgcagacccgtttgcagaccgtcctcggcagacccactttactgaaccccagcacccttatccttcacaagccagcattcctcgtcctttcgagagcgcgacttctctgccgcaggagtttggagcacgggaccagcagttcgaagaagatgactacgtagaaaagcaaccgttgacaggcggacaagcgttcgctggcgggttctatccaccagggtgagctctttttttcagttatacgtgttttatcagctcacctttgacctcagtcctgttgatcctgaggcctatggcgatccttatgctgggagtcgccctgcttccgtcgtgtcatcgtcgacaggcggtgaaaaaagtgcatggcgacgacgacagaccatcaagcgtggtgttacccgcaaggtcaaactgaccaagggcaacttcatcaccgagtatccagtccctacacctattctcagcgcgacagaagccaaatatactgccacgtccacaaccgagttttcgtaagtccaactgtcaatcgatcatgttcttttctttctcattacccttggccaggcatatgcgatacacagctgcaacatgcgatccggatgaattttcagaggccaacggttactcactgcgaacaaagatgtacaaccgtgagaccgagcttcttattgccgttacgtcatacaacgaagacaagacgctctacgcccgtactctgcatggcgtcatgctgaacattcgtgacatttgcaagacaaagcaatccaaatactggcgtcgacaggccgaggaaggcaatccagggtggcaaaagatcaccgttgcgttgattgtagatggacttgaaccaatggacaagagtgtactggatatcctggccaccgtgggcgtataccaggacggcgtcatgaagaagcaagtcgatggaaaagacaccgtcgcccatattttcgaggtttgtacaagagtaatcgtggccaagtttacaatacttattctacctatagtacaccactcaattatcagtggatgccactcctcaactggtgcttcctcaggccaacgatccaaacaacctggttcctgttcaaatcatttttgtcttgaaggctaagaatcagaagaagatcaactcccaccgttggttgttcaacgccatcggcaagattctcaacgtaagcttgtttcttcgttgctatctgtatacgtgtcttgattcggtatcatcagcccgaagtttgtgtcttgattgatgcgggtacgaagcccggccacaaatcaatcttctacctctggaaggctttctataatgaccctcacctcggtggttgctgtggtgaaattcatgccatgatcaagggtggaaagaagcttctgaatccattggttgccgctcaaaattttgagtacaagatgtccaatatcttgggtaagttgcaccactaccacattgtgtttgttcactcattccgtcatcaccacagacaaacctctggaaagtagtttcggctacgtctctgtgttacctggtgctttctcagcgtaccgttatcgtgccatcctcggacgtccattggagcaatatttccatggggatcattcgttggcagaccggctcggacccaaaaggtattacggaaatgaacatcttcaccaagaacatgtcttggccgaagatcgtattctgtgcttcgagctggtggcaaagaagaatgatagatggacgctgacatacgtgaaaccaagtaaagcagaaacggatgtgccagaatctgcccccgaattaatcggtcagcgtcgtcgttggttgaacggttctttcgctgcctcagtggtaagtttccgtgtttgtctttataatgagttgctgtaatcaagatggctttctagtacgctctggtcaatttcttcaaactctaccaatctggccatggcattttccgcatgttcttcttccatgttcaggctttagtaagtcgcatcttattctactttctgatcatagatattcatgctgtctccagtacaacatcttttcgctggtcttctcttggttttctcttgccaacatctggttgacatttagtatcatcatcgacttgcttcccaacctgcccggtgatactgccattatagtgtttggcacaaaggcagttgtaagtgctatgcgttcgcgattgacaggacgaaattgaaagcgtcttctagacacactgggtcaactttggtttcaaatggatctacctggctttccttgctttacaattcgtcctcgccctcgggaaccggccgaaaggtgaacgtgcagcatacacggttactttatggtgcgacacactatagctacgtggatcgagctaacattaatcatggaatagggtatatgccatactcgctctttacttgcttgttgtatatgccatactcgctctttacttgcttgtttgctctttctggcttaccattcaagcctttcagaacatacccaaactggtccaggcaaacggtggcgatgcaatcaagacgctcttccaaggaccagtgggagctttgatcgcagccatgttttcgacttatggtgagcctttcaggttcttggcttgctgtctggttgggctaacctgtgaacaacacttaggtatctatatcatcgcttccttcctctacgtacgttgcagacctgcgcttgatgactaccgtattcaccgttgcctctagcgtgatccttggcacatgttctcgagtttcttccaatatctcttgttggcgcccagcttcaccaatgtactcaacgtctatgcgttctgcaatctccacgatgtacgtatatgtgtatcttttacatttaaggttctaagagccctttcctaggtctcgtggggtacgaaaggtagcgataaagccgaagcactaccttcagtgtcatcttccaaagcaaaagacgctgatgtggctgttgtcgaggataccgcaaaggtccaagaggatgttgacgctgcattcaaggaaaccgtcacaagagccgtcaccaaaatcgaaaccaaggaggaaattgaaaagcctacgatggacgaccagaacaagacattccgtactcgtctcgtcgcgttctggatgttgtccaatgcatcgcttgccgttgctatttcaaacttgaatggtctgcctagttcaaaccctgcccaagacgaaaaagacttggccgacaagcagagcacatatttcaacatcatcttgtattcaacatttggtcttgctttcgttcgtttcattggagtacgttttatctactcgcgttgtgcaaggagttgattgacattacatccatgacagtgtctctggtacttcttcaagcgcaacctcttcagatgttgcagacggaactaaatgtagacctcgaaggtcccatcggaaatggaagcatatggattttggatttaggataggaatggacaattgtgctttctttgctcacgttctgcttttcactttttgctctgcatttaagattaaccgtcctttttagtctagtattcaccccgagtactgagagggggtcctaagatagaaggctcagtgacccctttcctt

SEQ ID NO: 26 - DNA, 3080 bp, Nectria haematococca
atggcgtacaatggccgtgatcaggagtacgggggacacccgatgcaggacatgcctggtggcagccagtatcacctcccccctcaagagaatgacgaggagcagggccgtggcctcctgaactctggctacgaccaagatcgactcggcgctcgtactccccccgaccgccccgtctcagcttacagtctcactgaatcatacgccccgggagcttcgacgactcctcagccgggtgttggatatggcgaacacaccggcagctttggccagtttggcgccaacctcgatcagcccgccccctttcccagacccgactctgcctttgacgccgaagacagctgggttgaacgacagcagcagcccatgggcatgggcatgggcaagggcggtggcctgaagcgcttcaacacccgaaaggtcaagctcgttcagggttccgttctcagcatcgactatccggtgcccagtgccatcaagaacgctgttcaggctcgctaccgcgatgtcgagggtggcaacgaggagttcatgaagatgcgatacacagccgctacctgtgaccctaacgacttcaccctgaagaacggttacgatttgcgaccccgcatgtacaaccgacacactgagttgctcattgccattacctactacaacgaagacaaggttctacttgcccgaactctgcatcacactatgcagaacattcgcgacattgtcaacctcaagaagtcgactttctggaacaagggtggccctgcctggcaaaagattgtcgtgtgcttggttttcgacggtatcgagaaggccgacaagaacacccttgatgtcctagcgactgtgggtatttaccaggatggtgtcatcaagaaggatgtcgacggcaaggagaccgtcgctcacattttcgaatacacctcccagctttccgtcacccccaaccagcagctcattcggcccaccgacgacggcccccagactctgcctcccgtccagatgattttctgcttgaagcagaagaacagcaagaagatcaactctcatcgttggctcttcaatgcctttggccgtatcctgaaccccgaggtgtgtatcctgatcgatgccggtaccaagcctagccctcggtctctgctggccctctgggagggtttctacaacgacaaggatctcggtggtgcttgtggtgaaattcacgccatgttgggtaagggcggcaagaagctgttcaaccccctcgttgctgtccagaactttgagtacaagatctccaacattctcgacaagcctctcgagtctgcattcggttacgtcagtgtgttgcccggtgccttctcggcgtaccgattcagagctatcatgggccgtcccctggagcagtacttccacggtgatcacacactgtccaagatgcttggtaagaagggtattgacggcatgaacattttcaagaagaacatgttcttggccgaagatcgtatcctgtgtttcgagctggtggccaaggctggccagaagtggcatctgtcttatatcaaggctgccaagggtgaaaccgatgttcctgaaggtgccgccgaattcatctcacagcgtcgacgatggctgaacggttcgttcgctgccactctgtactcgctgatgcacttcagccgattctacaagtcgggccacaacatcatccgcatgttcttcttccacatccagctcatctacaacttcctcaacactctcttctcctggttctctctcggttcttactggcttacaacttcggtcattatggatctcgtgggtacacccaaggtgaccagcggatctcacggctggccttttggtgacactgctacccctctggtcaacgctctgcttcagtggacatatcttggtttcgttatcctccagttcattctggctctgggtaaccgtcccaagggttccaagtttacctacattgcttcgttcatggtctttgctctcattcagggttacattctggttctctcagcctacctggttgttcgcgccttcgacaagcccattggacagcagatctcgttcgcttccggccaagaattcctcaacagtttctttggtggtgatagtgccggtggtgtcattctcgttgccctgatcactatttatggtctcaactttgtggcttccttcatgtacctggacccctggcacatgttccactccttcccctactacctggttctcatgtccacctacatcaacattctcatggtctacgccttcaacaactggcacgatgtttcttggggtaccaagggttccgacaaggccgaggctcttccttctgcccacgtcaccaagggcgacaagaacgaggccgttgtcgaggaaattgagctggagcaagaggatatcgacagccagttcgagcagactgtccgccgtgcccttgctcccttcaaggaggaggaggaggtcgagaaggctgatgtcgaggatggttataagtcattccgtaccggtcttgtcgtcacctggctgtttggcaacatcttcctcattctctgcattaccagcgataacttcgatggtcttggtctgggcgaggatgccactgcccgaaaagcccactacttccagttccttctgtgggctactgccgtgctctctatcgtccgtttcatcggcttcttgtggttcctgggtaagaccggtctcatgtgctgcttctcgagacggtgagcgcaacggcgggctacgcacgttgaaatcatctacactcgcatgttttgtgggggagccatggatacggaggacatggcgcttgtcaaagtagataaattgggttgttctcggatacctctactgtgtaacgtttgcttgttgtctgttttgattatttaatggagggcgaatcgagtcaaatcgaatcaaaaagacatatttgattgcggctgcggctgagggcattgattgaaacggggttggatcgggataggtacgcacacacagttaaagtgtatctctatgtagtcttttcagtttggcatctgatctgcccttgggggttcatgacgcatttgaatgatatgagttacttt

SEQ ID NO: 27 - DNA, 2736 bp, Neosartorya fischeri
atggcctaccaaggctctgattctcattcgccgcctcactacgacgataacggtcaccgacttcaggatctgccccatggatcgtacgaagaagaggcgtcgagaggattgctatcccaccagcaaggtcccttcacaggcccctttgatgaccctcaccagcatggttcatctactaccagacccgtttctggatacagtttgagcgagacctatgcccccgaagccgcatatcatgacccctatactcaacccagtcctggctcggtctactcggctcaatctgcggagaatccggcggcggctttcggtgtccctggacgtgtcgcgtccccctatgctcgaagtgacacttcatccacagaggcatggcgccagcgacaagctcctggaggcggccccggtgggttgcggcgttatgctacaagaaaggtcaagttggtgcagggttccgtcctgagtgtcgattatcctgttccgagcgcgatccagaatgccattcaggccaagtacagaaacgatctcgagggtggaagtgaggaatttacgcacatgcgatacaccgcagccacctgtgatcccaacgaatttacactacacaatggttacaatcttcgacctgcgatgtacaacagacataccgaactgctcattgcgatcacgtattacaacgaagacaagacactcacttcacgtacactgcacggtgtcatgcagaacattcgcgacattgtgaatctgaaaaagtccgagttttggaacaagggtggtcctgcctggcagaagattgtggtctgcctggtttttgatggtatcgacccttgcgacaaggacactttggatgttcttgcgacaatcggtatctaccaagatggcgtcatgaagcgtgacgtcgatggcaaagagactgtggctcacatttttgaatatacgactcaactgtccgtgactccgaatcagcagctgatccgccccaccgatgacggtcccagtacacttcctccggtccagatgatgttctgtttgaagcagaagaacagcaagaagatcaactcccacagatggctctttaatgcatttggtcgcattctcaaccccgaggtctgtattcttcttgacgccggtacaaagcctggcccgaagtcacttctgtcgctttgggaagccttctataacgacaaagatttgggtggtgcttgcggtgagattcacgccatgttgggtaagggttggaagaacctgatcaacccgctcgttgccgctcagaacttcgaatataagattagtaacatcctggacaagcccttggagagttcatttggttatgtcagcgtcttgcctggtgccttctcagcttaccgattccgcgcaattatgggccgccctctcgagcagtatttccatggtgaccacactctttcaaagcaactgggcaagaagggtatcgagggaatgaacattttcaagaagaacatgttcttggccgaagatcgtattctttgtttcgagttggttgctaaagctggttcaaaatggcacctgacatatgtcaaggcctccaaggctgaaaccgacgtgccagaaggcgctcccgaattcatttcgcagcgtcgtcgttggctgaacggttcgttcgctgccggtatttattcgctcatgcactttggtcggatgtacaagagtggacacaacatcatccgcatgttttttctgcacatccaaatgttgtacaatattttctctacgattctgacatggttttccttggcttcttactggcttactaccaccgtcatcatggacttggtcggcaccccgagcaccaataacggtgacaaagctttcccgttcggcaagactgcaactcccattatcaataccatagtgaaatatgtctacttgggattcctactgttgcaattcatcctcgcgctgggtaaccgtccaaagggttcgaagttctcatacctcgcgtctttcgtggttttcggcatcattcaggtctacgtggttattgatgcgctgtacctggtggtgcgtgccttcagtggaagtgctcctatggatttcaccacagaccaaggcgttggcgagttcctgaaatcgttcttttcgtccagcggtgccggtatcattatcatcgccctcgctgctacattcggtctctactttgtggcatctttcatgtatctggacccctggcacatgtttacgtccttccctgcctacatgtgtgtccaatcgtcatacatcaatatcctgaacgtctacgctttcagcaattggcacgacgtctcgtggggtaccaagggttcagacaaggcagacgctctaccctctgccaagaccaccaaggatgagggcaaggaggttgtcatcgaggaaatcgacaagcctcaggctgatatcgacagtcagttcgaggcaacggtcaagcgtgccctaacaccctatgtgccaccagtcgagaaggaagagaagactttggaagactcgtacaagagcttccgaacgagactggtcacgttttggatctttagcaacgcattcttggccgtttgcatcaccagtgacggtgtggataaattcggcttcacgaattctgctaccgaccggacgcagcgtttcttccaggctttgctgtggtccaacgccgtcgttgccctgttccgtttcatcggagcctgctggttcctgggcaagacaggtttgatgtgctgctttgcccggcgttag

SEQ ID NO: 28 - DNA, 3236 bp, Neurospora crassa
atggcgtaccacggtcggggcgacggctatgatggccaccagttacaagatctgcccggtgggcacaaccagggcgaccagcacgacgatgcgcaagctcccttcctctccgaaaaccctatgccttacgacaacgaccgcttgggcaccgatacgcctccagtccgccctgtctcggcgtatagcttgaccgaatcctatgctcctggtgctggcacgacgcgagctggtgtcgctgtcaaccctaccccgccacctcacgggggttatggcggcggcggcgttagcagtggtgtcgatcagggctacaactacggtggtgactatgcgacggatccggcctacaggatgtccgccatcgatgaggacgatagctggctccgtcgtcagcagcccaacgctgctcccaccggcggcctgaagcgttatgccaccagaaaggtcaagcttgtccagggttccgttttgagtcttgactatcccgttcctagtgctattaggaacgctgttcagcccaagtaccgcgatgaggagggcaacaacgaggagttcttcaagatgcgttacactgccgccacttgcgatcccaacgactttacgctcaagaacggttacgatttgcgccctcgcatgtacaacagacataccgagcttctcatcgccattacgtactacaacgaagacaaggtcctgctctccagaacgctgcactccgtcatgaccaacatccgcgatatcgtaaacctgaagaagtcttcgttctggaaccgcggaggaccggcgtggcagaagattgtcgtttgcttggttttcgacggtcttgataagacagacaagaatgttctcgacgttctggccaccatcggtgtttatcaggatggtgtcatcaagaaggacgttgacggcaaggagactgttgcacacattttcgagtacacaagtcagctttccgtcacaccaaatcaggcgctcatccggcccgtggatgacggcccgcagacactgccccctgtgcagttcattttctgcctgaagcagaagaacaccaagaagatcaactcgcatcgttggctgttcaatgcctttggccgtatcctcaaccccgaagtatgcattctgttggatgccggtaccaagcccagccccaggtcgctgttggctctttgggagggtttctacaacgataaggatcttggcggtgcttgcggtgaaattcacgccatgttgggcaagggcggcaaaaagctgctcaaccccttggtcgccgtccagaacttcgagtacaagatttccaacattctcgacaagccgctggaaagtgcttttggttacgtttctgtgttgccaggtgccttctcggcctaccgtttcagagccatcatgggccggccgctggagcaatacttccacggtgatcacaccctgtccaagcttttgggcaagaagggtattgagggtatgaacattttcaagaagaacatgttcttggccgaagatcgtattctctgcttcgaactggtcgccaaggctggccagaaatggcatctgagctacatcaaggctgccaagggcgagaccgatgtgcccgaaggtgcgcccgagttcatctctcagcgtcgtcgttggctcaacggttcgttcgccgccagtttgtactcgctcatgcatttcggaagaatgtacaagagcggtcacaacatcgtccgcatgttcttcttccacgtccagctcatctacaatatcgcaaacgtcatcttcacatggttctctctcgcttcctactggctcaccaccactgtcatcatggatcttgttggtaccccggttacggcttctagctcttcggcagaacatcacggttggcccttcggtgacacggtaacgcccttcttcaacgcggttctcaagtatatctacctggcattcgttatcttgcagttcatccttgcattgggtaatcggccgaagggttccaagtggacatacattacctcgttcttcgtcttctcgctcattcagtcctatatcttggttttgtccggttatcttgttgcccgcgcgttctccgtaccgctcgaccaacaattacagctggacaacgctaaggacgcaatggcttcgttattcggcggctcaggatcagcaggtgtcattttggtggccttggttaccatctacggcctttacttcttggcctcctttatgtacctcgacccctggcacatgttccactcgttcccttactacatgctcctcatgtcgacctacatcaacatcctcatgatttacgccttcaacaactggcacgacgtctcgtggggtaccaagggttcggataaggccgaggcactgccgtccgccaacgtcagcaagggcgagaaggatgaggccgtggtggaagagattgagaagccacaggaggatatcgaccaacagttcgaggctactgtcaggcgcgctcttgctccgtacaaggaagacgagacgccggagcctaaggatctcgaggactcgtacaagtctttcagaaccatgcttgtcgtgtcttggctgttttccaactgcctcctcgcggttgttatcaccagtgataactttaacacatttggcatcgggcaaaccgcatccgcgagaactgcgtggttcttcaagttccttctgttcgctactggtgcgctctctgtcatccgctttattggcttctgttggttccttggcaggaccggtattatgtgctgctttgcccgtcgctaagctaggcaaacccaaaacacgtggttgttgttggggcttgtacattgcttacaaagcgcaaaagggaagaaggaagggagaagggttactgctttttggcggcggcacggcgtcatggcagggtagtaccgtgaaacggtcacaaaaagcctactttctattacgtgtgtagtatcaaacgttggcttctctttttttgacggtctgaaaggctgtgtggtgtttcgcattgttggggtgaactacttgcttgctttttggttggctgggtgtgactatgatagatggaacgaacgggacactctctttgacatacataggttgctgtcttgattatgggttaatgctttttccgagatgtcgataggagggagccagcatgtattgattttgaccctgcaacgtcttcgagcagctaggtcgagagacatgtagtaaagagagctatgcgtgtggagaaatgttcaagacgacatttaagt

SEQ ID NO: 29 - DNA, 3282 bp, Oryza sativa Japonica Group
aacttctttatcaacgtccgctcgccctcgagagcgccccttcatcccctcgctttgcgcctttgcaccacgcccctcgcacctgccccccctcatccccctcacaccttccaagtcccactgcctggccccgaccgcagcacgtcatggcctaccaaggaggacccggggcaaacagctacggcgaccctcacgcacctcacccatacgaggcccgccacgaagaggaggaagttggacgctcgctcctccactcaaaccctaccggcacacaacaggggcccttcgacgaccatcacggcgtctacggccacgaccagcgcccgcagtcgacctacagcctgaccgagacttacgcctcagatgcccctcagacacagtatgccccacagtcgcactctggctcagacgtctactcggccactggcggctacgacccttccaccgagtatggcgcaccgcacagggccacttcgccttacgcgcggagtgagaccagctccacagaggcctggaaacagcgccagcagcccggcggcggcatgggcctcaagcgtggtctgacgcgtaaggtcaagtcggtccaaggctccgtcctttcggccgactaccccgtgccaagtgccatccagaatgccatccaggcaaagtaccgcaatgacctcgagagcggcagtgaggagttcacccacatgcgatacacggccgccacatgcgaccccaacgacttcacattgaagaacggctacaatctgcggccagccatgtacaatcgccacactgagttgctcatcgccatcacctactacaacgaagacaaggtgcttaccgcccgtactctgcatggtgtcatgcagaacatccgtgatattgtcaacctgaagaagtctgagttctggaacaggggtggtcccgcctggcagaagatcgttgtctgcttggttttcgacggtatcgacccttgcgacaagggcaccctcgatctgcctgcgaccgttggtatctaccaggacggtgtcatgaagaaggacattgacggcaaggagaccactgcccacattttcgaatacaccactcaattgtccgtgacacccaaccagcagcttatccgcccgcacgatgacagtgccagcaccctgccacccgttcagatgatgttctgtctgaagcagaagaacacaaagaagatcaattctcatcgttggctcttcactgccttcggccgtatccttaaccccgaagtttgcattctgctcgatgccggcactaagcccggtccaaagtccctgcttgcgctgtgggaggctttctacaacgacaaagatctaggtggtgcttgcggtgagatccacgctatgctcggaaagggttggaagaacttgctgaatccgctaatcgcaactcaaaacttcgagtacaagatttccaatattctcgataagcctcttgagtcatcttttggctatgtttccgtcttgcccggtgccttctccgcttaccgttaccgcgccattatgggcaggccgcttgagcaatacttccacggtgaccacacacttgccaagattcttggaaagaagggtattgaaggcatgaacattttcaaaaagaacatgttcttggccgaagatcgtattctttgcttcgaacttgtggcgaaagctggctcgaagtggcatttgacatatgtcaagtcctccaagggtgagactgacgtgcccgaaggtgctgctgagtttattggtcagcgtcgtcgttggttgaacggttcctttgctgccggtatctactcgctgatgcactttggccgcatgtacaagtccggtcacaacctcattcgcatgttcttcttccacatccagctgctttacaacatcttccagaccattctctcttggttcgcccttgcttctttctggctcactacatcaatcatcatgactctggtcggtaaccccgaacccaaggccaatccaccgaagaaggcctggccgttcggtgacaagttcactcctaccttcaacacggttgtccagtacatctacctcgccttcctgggtctccagttcattctcgctctcggtaaccgtcccaagggttcgcgatggtcttacatgacgtccttcattgtgtttgctctgattcaattctacatcatcgttctgtccatctaccttgtcgtcgttgccttttcgggcaaaggcaccaagggcatcaacaccgattccgccaagtccttcttcacctctttcacgagcaacgacggtatcggtatcatcattctcgctatggctgcaaccttcggtctgtaccatgtcgcttcgttcctgtacatggatccatggcacatgttcacctccttccctcagtacctcctcattgcgtcgtcgtacatcaacattctcaacgtctacgccttctctaactggcacgacgtttcttggggtaccaagggttccgacaaggcggatgccctgccgtcggccaagaccgaaaaggcttctgacggtaaacacacggtcattgaagagcccgatctcccgcaagccgatattgacagccagttcgaggcgaccgtcaagcgcgcgcttgcaccctacgttcctcccgtcgaatcgaacgagaagactctggaggattcgtacaaatctttccgtacccacttgacaactgcttggattggtatgaacgcgttgcttgccgtggctgttcagcaggacgacatgaccaaatttggcttcacgtcatcttcgaacgaacgtactgccgccttcttcaagttccttctcgtctccacagccattcttgctcttatccgcttcatgggttgcctgtggttcttgggtcgcagtggtatcttcttctgcgtccgcaagagataaaggcactatcgccaagcttatgaaccccaccccgttccttacaacggccttgttataccaccatgtgtgatttttccgattcccctaatgtttttgttcgcgcttccgggtgctggcgttttggcatatccattggactccagccggctgggttggctcatcttatcggtaaagaaaaaacttgtcacgtcagttatgcttgactggatcgcaaggtcggttggcatccccattgtactatttggcttctgcaggcgccaatacttttgttattgggggagatgaaagccggcaagaagaacggaagctttatgattgtgatacacgagtcatctccgtgtttttttttggaccattggagtgcgatttagaatgagcaattcgaacacttttcactttg

SEQ ID NO: 30 - DNA, 2784 bp, Paracoccidioides brasiliensis
atgccctcacaagccaccgccctcaaccaggcagaatattactcggtacctgaaccaagtatccataatagcagtgacaggaacagggatggtcgcaacgccgcttgtgtatgtaccaaacttgactttctggtaccgtaccgtaccatactcgccgcctgctccgttgttgctagttggcaccgggaattgtcgactctcgcttggttgcgaccacattctctcatcatggcctatcaaggccctcattcttccggcggcggctacggcgaagcccatcgtctgcacgacctcccgcaaaacggaagtcaatataacctccccgctgagcacgatgcatctcaatctctccttcaccaaaaccaaggccctttcagcggccctttcgacgacccccaccagcgcggtggttctccgttccactccgcctccggatacagcctgacagaatcctacgtaacagaccaaccccagtcccaagatcattacggagggcagatgggcgagaatcccgctgccggctttggcgtgcctggccgcgtaccatcgccatacacccgcagtgaaacttcgtctactgaggcctggcgtcagagacaagggccgggaaatctacgtcgttatgctactaggaaggtcaagctggttcaaggctctgttctcagtgtcgattatccggttcctagtgctattcagaatgctgtgcaggctaaataccgcaatgatcttgagggtgggagcgaggaatttacccatatgcgatacaccgctgctacatgtgatcctaatgagttcacattgcacaatggctacaatctgcggcctgcaatgtataaccgccatacagagctcttagttgcaatcacatattacaacgaagataaaatgcttacttcgcgcactttacacggcgtgatgcaaaatatccgggatattgtcaacctcaagaagtctgaattctggaacaagggtggtcctgcttggcagaaaattgtcgtctgtctcgttttcgatggaattgacccttgcgacaaagataccctcgatgtgctggccacagttggaatctaccaggatggcgttatgaagaaagattttgaatataccacccagctctctgtgaccgctaaccaacaactcattcggccacacgatgatggcccgtccacactgcctcccgtccagatgatgttgtgtctgaagcagaagaacagcaagaaaatcaactctcacagatggctcttcaatgcctttggccgaatcctcaacccggaagtctgcatcttgctcgacgcaggcaccaaaccaggtcccaaatccctcctagcgctctgggaagccttctacaacgacaaagatctgggtggctcctgtggtgaaatccacgctatgctgggtaaaggctggaaaaagctcttcaatccgctcgtcgcggcacaaaacttcgaatacaaaatcagtaacatcctcgataaacccctggaatcctccttcgggtacgtcagtgtgcttcccggcgcgttctcagcttaccgcttccgcgccatcatgggtagacctcttgagcaatatttccacggtgaccacacgctgtccaaacagcttggccccaagggaatcgagggcatgaacattttcaagaagaatatgttcttggctgaggatcgaattctgtgtttcgagttggtagccaaagcggggtcgaagtggcatctgtcatatgtcaagtcgtccaagggcgagactgatgttcctgagggtgctcctgaattcatcggacagagacgtcggtggcttaacggttcgtttgcggccagtatttactcgctcatgcatttcgggaggatgtataagagtggccacaatattttgcgcatgttctttttccatattcagatgctttacaatttgtttacggttttcttgacttggtttgcacttgcttcctactggcttacaacttccgttatcatggacctcgtcggtagcccgcccagcccagggtctgtgagcgaccaggagcgcgcattcccatttggcaacactgcgactcccatcgttaatacagttctgaagtacctgtacatagccttcctgctcctacagttcattttggctttgggtaatcgccccaagggctccaaatactcgtacataacctccttcatcgtcttcggcataatccaattctacataatagtcctatcaatgtacctcgtcgtccgcgccttctccggcggcagactggccttcgacacgacccacggcatcggcccattcctgatatccttcttctcctcttccggccccggaatcatcatcatagccctcgccgcaaccttcggcctctatttcgttgcctccttcctgtacctcgacccatggcacatgttcacgtccttcccctcctacctcctcatcatgtcctcgttcataaacattctaatggtgtacgccttcagcaactggcacgacgtttcctggggtacaaagggtgcggacaaagcggacgcgctgccctcagcccaaacgcagaaggacgaaggcggcaaagaagccgtcattgaggagatcgataagccgcaggcggacattgatagtcagtttgagagcactgtgaagcgcgcgttgacgccgtttgttgagccgaaagttgtggagaagaagacgctggatgactcgtataagagtttccgcacgcggttggtgacgtcatggttgttttctaatgggattctggctgtggctattacgagtgaagatgcaaataagtttgggtttgat

SEQ ID NO: 31 - DNA, 5857 bp, Penicillium chrysogenum
  misc_feature (1918)..(1918): n is a, c, g, or t
tacaaatagggttagcggctaatttatctcgaacatccatggatggctcctcctgtgatgattgctgggggtcactgaaatcttattaaattaagttcgggggaagaaaagaaattaaagaaattaaaaccgattttttttctgactcgtgcagcaatatactataccgcagttactaccgtatatcggctaagtacagagctgaatgtcagcacaactcacaacattggaagtttaagagctgatcgacttggcactgggcaaaacatacgctagatacgctagatgcttgggtccataaaaaatgtctaaatttatcagggtcaggtgacctgggagtacaacatatactttatcctggcagagtataggagagaatggaccgaatgaagaatcatagaatgagaaactgtaaataaggaagttgaatgggcgagactacgaggactttctatgcaacatacattgtacattcaaacacatatagtggggtcgcgacataccaccccccataagtgttaagccttttgaactgtactccgtatttagctcttaagaatgtgggaatgagtctagttatgtctacgatataaaccgaattcaattatatgagaggtcgacttcaaatgttcgtattcacacgtttcatgagtggagcctcttattaggttcgggtgttttagactccaaatgtacccgtgggcatctttctaaagggtctaagtacaacttcgtacttacccaaaatgtaaatacgtcgaatcagtgaaaggaggacaaagttcaaagaagaagagaaaggaaaagaaaaaggaaaaaggcgaaaaaaaaaaaaaaaaaaaaaaaaaaaaaaagaagtagaaaaaaactagaattccaagcatctcagcctttgatatctcaaccagtcagggtcttccgtaggcctcgggggcatcggactcttgttctcttctagggatggagtatgtatggcttttttacttaagttgatatggtacatacatacatatatgtatggatgtacatatccatggatgtactctgtactccttatacctcgagttaaaatataaatacaataattaaataattaaaaaccggtaaactagtcaaacgaaaaaaacacccaaataataaaaataccagagaaaggggaaactaaactgggacggggctaggagacagtctatttttgacctctctagtctcactgtctccctttttttttttacccttttcgccccccttctcttttgtttctctctgaccctggattcaaagcatttgcaatattccctgaaaaagaaatattcatctctcctagccctggtggcttcgataattgttcataagtgcgccctgctcgaacagatacccctctcttgttagctttgaaacacatccctttctgattttcaacctttgcgacaccatggcctaccacggctctggctcgcactcaccaagctatgatgatagtcatcatctgcaggatgtgccagcttcgcaggtatgtgtgtgtggagaggcggtgaactagtcgcgagagctgacccggtaaattttttttttctcttagtatcgcgaggatgaggatgcagcccgtggattattgtcccaacagcagggtccatttgcgactccttttgacgacccccactcgcgcggtgtttctccccaacgtccgtcttctgggtacagcttgacggagacctatgcaacggacaccgccccttcttaccacgacccatacagtactggcaccgtttattccggccaagaggaaagtactgcggcggcctttggtgtccccggccgagttgcatcgccctatgcccgcagcgagacctcctccacggaggcttggcgccagcgacaggcccccggaggcgcctctggtggtggtggtggcggncgcttgcgcagatatgctactaggaaagtcaagctagtgcagggttccgtcttgagcgtcgactacccggtgccgagtgccatccagaatgccatccaagccaaatatcgcaacgacgtggaaggcggaagcgaagagtttacccacatgcgatgtacgtgtggaccagacgaccaatatacggctctaagagaaaaactaatgagccttcactcttcatagacaccgcagccacttgtgaccctaacgaatttaccctccacaatggttacaacctacgccccgcaatgtacaaccgtcatacagagctgctcatcgcgattacctactacaacgaggataagaatctcacggcccgtaccttgcacggtgtgatgcagaacattcgcgatattgtcaacctgaagaaatccgagttctggaataagggtggacccgcgtggcagaagattgtcgtggcactcgtttttgacggtattgacccttgcgacaaggatactcttgacgtccttgcgaccatcggtatctaccaggatggtgtcatgaagcgtgacgttgacgggaaggagactttggcacatatcgtaagcggatggcaggataggcctcccaaaggaaacagcgctaactgaatttccagttcgagtatacgacccagctttcggtcacaccaagtcagcagctcattcggcccacggacgatggcccgagcacactaccgcctgtgcagatgatgttctgtctgaaacaaaagaacagtaagaagatcaattcgcatcgttggctctttaacgctttcggccgtattttgaaccccgaggtctgtatcctgctggatgccggtacgaaacctggccccaagtccttgttatacctctgggaggcattctataacgataaggatctcggcggtgcctgtggtgaaatccacgccatgttgggaaagggatggcggaacttgatcaaccctctcgtggcagcccagaactttgagtacaagatcagtaatatcttggataagccactggagagttcgttcggctacgttagtgtcttgcccggtgctttctcggcctaccgattccgtgcaatcatgggtcgaccccttgagcaatatttccacggtgagcacacgctgtctaagcaacttggaaagaagggtattgagggtatgaacattttcaaaaagaacatgttcttggccgaggatcgaattctctgtttcgagttggtcgctaaggcaggctctaagtggcacttgtcttacgttaaagcctccaagggtgaaactgacgtgcccgaaggtgccgccgagtttatctcccagcgtcgccgttggctcaacggttcctttgcagcaggaatctactcgctgatgcactttggccgtatgtataagagcggtcacaacatcattcgcatgttcttccttcacatccagatgttgtataacatcttcaacactttcctcacctggttctcgttggcttcatactggctgaccaccactgtcatcattgaccttgtcggtactccaagccccagcaacggagataccgctttcccctttggcagggacgctacgcccattatcaacacaattgtgaagtacggatacctcgctttcctattgttgcagttcattctcgctcttggtaacagacccaagggttccaagttctcatacctcgcctcgtttgtggtcttcggtctcattcaggtgtatattgtggtcgattcgctctacttggtagttcgcgcgttcagcggtggcgcacccatggactttgttaccggccaaggcctgaaagccttcctcgactctttcttttcgtcgacgggcgctggtatcattatcattgccttggctgccacattcggtctttacttcgttgcctcattcatgtacgccgacccatggcacatgttcacctccttccctgcctatatggttgtccagtcgtcctatatcaacatcctgaacgtctatgccttcagcaactggcacgatgtctcctggggtaccaagggttctgacaaggccgatgcattgccgtcagccacgactacaaaggacgagggtagcaaggaagcagtgatagaagaaatcgacaagccccaagcggatatcgacagccagttcgaggcaactgtgaagcgtgcgctcactccattcgttgcccccgtggaacagaacgaaaagacactcgaggactcttacaagagtttccgtacccggctcgtcaccttttggatcttcagtaatgcggccatggcagtatacatcaccagcgagtccgtcgataagttcggcttcacagtaagcttccactcttcttcaacctttctgactagaccaccgactaacatgatcatagaataccgccaccacccgcacagcccgtttcttccaggcactcttgtggtccaatgccgctgtggcattgatccgtttcattggatgctgttggttccttggtcgtactggtatcaagtgctgctttgcacgtcggtagttccccaggacaaaatgtgtaccctttttcatgacccccctgacccaattttctattctcttccttttatttcccataccgtgatctgtattctacctaaagatgcccgactttgttctcttttgattttgcaatgccagccagtatgtattcgcacggttttaccttttgacggttactgtggtcacttttttgtcggatcagccatgcaacgggatcgcattcggagcgctatgattatgtacttcatattcaatatatctttttttccccctttgagatttattgagtagaaagatatatgtcatgtttcccatagactgtacatgcatagtagagagtccccgggtccaatacgtcaactggaaggcggagaggcgataaaggcgattgctgatctgagaccccccgcaagagggctacccttcactctgttgtcatccttgtcacccgttgatcacgtcctctaaaaatcctttcctttctgtctctctttttttattatctgatacctctagagtggttaccttgcctcctactcactctccccaaacctccattccaccaggtggggtggtgactcccgaaatgttgaaaatctggtcgatggtagggattcatctggcttttgaaaaaaatgccgtatgattaactttctgtgcagaaacaaaagcagcaggaggctgagaatgccgagggtgctgcaggcaagaagaagaagaaggtcacagcggcgcaattacgcgtgcaacgaggtgagtgactttcccgtagtggacagtacaactcgcagtacttactggatcgttgtcatatggatctctaacctcttatatcttcagaccttcaagaactcacctcggcagacgatgaaaatgtctttcccaaaccccgacgacatcctcaacttcaccttgaccatcgaacccgacgagggcatgtataagggtggtgtcttcaactttagctttgccgtcaaccagaacttccctcatgatcctcccaaggtcaaatgcacacaaaagatctatcatcccaatatcgacttggagggtaacgtttgcttaaacattctacgagaggactggaagcccgtgttgaatttgaatgctgtcattgtgggcatgcaggtctgttgatttatctattctgactggtcattgatttcgctgacaggtattccactgcagttccttttcctcgagccaaacgcctccgaccctcttaacaaggacgctgcggaagatcttcgcgctactcgtgacatcttcaagaagaacgtacgcaactccatggccggcgggtccgtccgaggcatatcgtttgagcgggtgttacggtgaatgctagctaggatttcttcacacttgcagtttttccatcggttcccatatccggactccgcccataccccacggcgacg

SEQ ID NO: 32 - DNA, 3082 bp, Penicillium marneffei
atggcctaccaaggcggccatcctcactcgccatcctcgaattatgctgatgagggtcatcgaatgaatgagttgggacacaccaaccaatacggtgaagacgatgcctcccgaagcttgttgaaccagggccccttcaacggacccttcgaagaccctgtccacagccgagccgcttccccaatgcgcccagtttcaagatacagtctgaccgaatcctatgccgccgactcagcagctcccccctaccatgacactggcgccgaaaaccctgcgactgcttttggtgtccctggccgtgtggcttcaccatatgcacgcagtgagacttcttctactgaggcctggcgtcagagacaagctcctggcaccggtctgcgccgatatgccactaggaaggtcaagcttgtgcaaggttccgtcctgagtgtcgactaccctgttcctagtgctattcaaaatgccgtccaggccaagtaccgaaatgatctcgagggtggcagcgaggagttcactcacatgcgatacaccgccgctacttgtgatcctaacgaattcaccttgcacaacggttacaacttacgaccggccatgtacaaccgtcataccgaactgttgattgccattacctattacaacgaagacaaacagctaacttcccgaaccctgcacggtgtcatgcaaaatattcgcgacatcgtcaacttgaagaagtctgaattctggaacaagggtggccccgcttggcagaagatcgttgtctgtcttgtatttgacggtatcgatccttgcgacaaggacactcttgacgttcttgctaccattggtatctaccaagatggtgtcatgaaacgtgatgtcgacggaaaggaaaccgtggctcacattttcgaatataccacccagctttccgttacacccagccagcagctcattcgtcctaccgatgatggccctagcactttaccgcctgtgcagatgattttctgcttgaaacaaaagaacagcaagaagattaactctcacagatggctcttcaatgcctttggacgcatcttgaaccccgaaatttgcgtcctgctcgacgccggtaccaagcccggccccaagtccattttgtctttgtgggaggctttctacaacgacaaggatctcggtggtgcttgcggtgaaattcacgccatgttgggtaaaggttggaggaatttggtcaaccctctcgtcgcagcgcagaatttcgagtacaaaatctccaatattctcgataagcccctggaatcctcctttggatatgtcagtgtcttgcccggtgctttctcggcataccgattccgtgctatcatgggccgacctctggagcagtatttccacggtgaccacaccctttctaagcaattgggtaagaagggtatcgagggcatgaacattttcaaaaagaacatgtttttggccgaagatcgtatcttgtgtttcgaactggtggccaaggccggttctaaatggcacttgtcatatgtcaaggcttccaaggccgaaactgatgtgcctgaaggtgctgctgaatttatttctcagcgtcgtcgttggttgaacggttcttttgctgccggtgtttacagtcttatgcatttcagccgtatctacaagagtggtcacaacattcttcgtatgttcgttcttcacttccaaatgctttacaacactttcaacactatcttgacgtggtttgctcttgcatcttactggcttactacatcggttatattggatcttgtcggaacgcctagtaattccaatggtaaccaagcctttcccttcggtaactctgctactcccatcatcaatacactagtcaagtatggctatctcggtgtgctgctgcttcaattcattttggctcttggaaatcgtcccaagggttcgaaacacacatatattatgtcgttcatctttttcggcattgtgcagctctacattgtggtagactctttgtacttggttgtccatgccttcactggctccgcacccatggattttgacactagccacggagttggtggcttcttgaaatcgttcttcgcatcgtccggtgcgggtattattattattgcgttggctgccactttcggtctctacttcgtcgcttccttcctgtacatggacccatggcacatgttcacctcgttccccgcctatctcttgatcatgtcgtcctttatcaatatcctcaacgtttacgccttcagtaactggcacgatgtctcctggggtaccaagggtgcagataaggccgatgctctgccatcggttcaaacgcaaaaagaagcggacggaaaaggagcagttattgaagaagttgacaagcctcaggctgatattgacagtcaatttgaggccaccgtcaagcgtgccttgacaccatttgtgcctcctgttgagaaggaggagcgcagcttggaggattcttacaagagtttccgtaccaagcttgtcagtttctggatcttcaccaacgctcttttggcagtctgtatcaccagtgatggtgttgatgaattcggattcacaaacaaagccactactcgtaccacacactttttccaggccctcctttgggccaccgccgctgttgcactggtccgattcatcggatgttgctggttcctgggccgaactggtatcatgtgcatgtgtgcccgacgataaacatttacgaaactatacaggggctgctgcatgcagctggctgtggaccagtggctccatctggcgctgtttgtccttcccaaaagaacgcattttaatatccctcggattccccccaatgatcttcgatttgttttcccttctgaacatgtagtgtactgtagatccacgtccctttgcctgtttccggctcattttattgcctttttttctctctctttttattttcatgtcctgtctgcttgctaaatatatttgaactgtttcttgtttctttatccatggtcgtgacgatatcgatacgctttgtgttccttggcgagcaaagtacgtaggataaattagtatagttcgagaatcaattgtactgaatatg

SEQ ID NO: 33 - DNA, 2908 bp, Phaeosphaeria nodorum
gacagagcgcgccaggaccgaaagagcctagccctgcctccgagctgaactccctgaagagagcgcctcagacatcctcgcgccttttattatccagcgctccccacaagtgcgccattctttttgaattccatctccttgcatcgacacaccacccaccgctctattgtacgccatcgccccgagtgcagccccgacccgctgcccaccatggcctacaacaaccaggcctacggcgagccacacaccggctacgaccgcagggacgaggacgaagtcgcccgctcgctgctccacgagaaccccacgggcgcccacccagaccccttctacggccatcccgccgaacagcgcccacactccacatacagcctgtcagagacatatgccaccgacaggccaacgcagtacccgggacaggcccacgagggctccgacgtctactcggccaccggcggctacgacccggcctcggactttggcgcaccacagcgggctccctcgccctatgcgaggagcgagaccagctccaccgccgcatggagggagcgacagcagcccggcggtgccgttgcagcagccggcggcctcaagcgcggcatgacccgtaaggtcaagcttgtgcagggctccgtcctcagtgccgactaccccgtgcccagtgccatccaaaatgccatccaggccaagtaccgcaatgacctcgagagcggcagcgaggagttcacccacatgcgatacacggccgcgacgtgcgaccccaacgacttcacgctaaagaatggctacaacctgcgtccggccatgtacaaccgccacaccgagctgctcattgccatcacctactacaatgaagacaaggtcctgactgcgcgtaccctccacggtgtcatgcagaacatccgcgacattgtgaacctcaagaagtccgagttttggaacaagggtggtccggcttggcagaagatcgtcgtgtgccttgttttcgacggtatcgacccctgcgacaagggcacgctcgacctgctcgccaccgtcggcatctaccaggatggtgtcatgaagaaggacattgacggcaaggagacggttgctcacatcttcgagtacaccacacagctgtccgtcactcccaaccagcagctcatccgcccgcacgatgacagcgccagcacccttccccccgtgcagatgatgttctgcctgaagcagaagaacagcaagaagatcaactcccacagatggctcttcactgccattggccgcatcctgaaccccgaagtctgcattctgctcgatgccggtaccaagcctggccccaagtcgctgctcgcgctctgggagggtttctacaacgacaaggacctcggaggtgcctgtggtgaaatccacgccatgttaggaaagggctggaagaacctcctcaaccccctcgtcgccgcacagaacttcgagtacaagatcagtaacattctcgacaagccgctggaatcgtcctttggttacgtctctgtgttgcccggtgctttctccgcctaccgctaccgcgccatcatgggccgacctctcgagcagtacttccacggtgaccacaccctcgccaagatcctcggaaagaagggtattgagggcatgaatattttcaagaagaacatgttcttggccgaagatcgtattctctgtttcgagttggtcgccaaggccggctccaagtggcatcttacatacatcaaggcttcaaagggtgaaaccgatgtgcctgaaggtgctgcagagttcatcggtcagcgtcgtcgtctggttgaacggttccttcgctgccggtatctactccctgctccatttcggccgcatgtacaagagtggccacaacctcgttcgcatgttcttcttccacattcagctgatctacaacatgtgtcaaacggtcctcgcaatgaaaaatttgccgaatctttcttcaaatctgatggtgtgggtatcatcattattgcgcttgctgcgactttcggtctctactacgttgcctcgttcctctacatggacccatggcacatgttcacctcgttccctcagtaccttttgatcatgtcctcgtatgtcaacattctcaacgtgtactcgttctccaactggcacgatgtttcttggggtacaaagggttccgacaaggccgatgcgcttccgtcagcgattaccgaaaagggcaaagacggtaaacacacggttattgaggagccagatttaccacaggccgatattgacagccagttcgaggctaccgtcaagcgcgctctcgccccctacgtcccacctgtcgagggcgacgagaagacactcgaggattcgtacaagtctttccgtactcatttgtgtactgcctggattggttctaacgctaccctcgccgttgtcattacacaagacaagtttgaccgcttcggtttctcgtcaaacgcctcaagccgaaccatgcacttcttccaggccctcctgtgggccaccgcggctctcgctctcgtccgtttcatcggatgtttgtggttcctcggccgcaccggtctcttcttctgcgtgcgcaagcgctaaatcagcgtcttcccctaatgaatgttttgggcgttattccggatcatccagcaggctggcgctgcttgctttgctcgagaacaaaaaaaccctacacacatacactaaagccccaatggccatgtgcaacgagttatctgtattacacccctctgtttgcatcggtaactgataccgcggattacaatctttaatgatggatctcgcttgatgacttgacttggaattggatacactattggtgtaatcttcgttgcgagatagcgggcttgcggtttgggtttttacatttagaatgaatactatcatattttacaaa

SEQ ID NO: 34 - DNA, 4657536 bp, Podospora anserina S+ mat (residues 1-1,552,512 of 4,657,536)
  misc_feature (5979)..(6128): n is a, c, g, or t
  misc_feature (10388)..(10745): n is a, c, g, or t
  misc_feature (12025)..(12066): n is a, c, g, or t
  misc_feature (19150)..(19263): n is a, c, g, or t
  misc_feature (20294)..(20310): n is a, c, g, or t
  misc_feature (20622)..(20660): n is a, c, g, or t
  misc_feature (22070)..(22096): n is a, c, g, or t
  misc_feature (22346)..(22376): n is a, c, g, or t
  misc_feature (23427)..(23782): n is a, c, g, or t
  misc_feature (441648)..(442416): n is a, c, g, or t
  misc_feature (443511)..(445238): n is a, c, g, or t
  misc_feature (447109)..(447165): n is a, c, g, or t
  misc_feature (511365)..(511560): n is a, c, g, or t
  misc_feature (513553)..(513810): n is a, c, g, or t
  misc_feature (515916)..(516101): n is a, c, g, or t
  misc_feature (518341)..(518440): n is a, c, g, or t
  misc_feature (519756)..(520450): n is a, c, g, or t
  misc_feature (521964)..(523042): n is a, c, g, or t
  misc_feature (558685)..(558708): n is a, c, g, or t
  misc_feature (560073)..(560110): n is a, c, g, or t
  misc_feature (581622)..(581771): n is a, c, g, or t
  misc_feature (587762)..(587911): n is a, c, g, or t
  misc_feature (605885)..(606034): n is a, c, g, or t
  misc_feature (613192)..(613341): n is a, c, g, or t
  misc_feature (622411)..(622560): n is a, c, g, or t
  misc_feature (633743)..(633892): n is a, c, g, or t
  misc_feature (652067)..(652216): n is a, c, g, or t
  misc_feature (673489)..(673638): n is a, c, g, or t
  misc_feature (724985)..(725134): n is a, c, g, or t
  misc_feature (759502)..(759651): n is a, c, g, or t
  misc_feature (761346)..(761495): n is a, c, g, or t
  misc_feature (798726)..(799664): n is a, c, g, or t
  misc_feature (810776)..(810919): n is a, c, g, or t
  misc_feature (820266)..(820292): n is a, c, g, or t
  misc_feature (821912)..(821931): n is a, c, g, or t
  misc_feature (847571)..(847720): n is a, c, g, or t
  misc_feature (851454)..(851603): n is a, c, g, or t
  misc_feature (870192)..(870341): n is a, c, g, or t
  misc_feature (914046)..(914195): n is a, c, g, or t
  misc_feature (915963)..(916031): n is a, c, g, or t
  misc_feature (922575)..(922724): n is a, c, g, or t
  misc_feature (924227)..(924318): n is a, c, g, or t
  misc_feature (932796)..(933686): n is a, c, g, or t
  misc_feature (946696)..(946845): n is a, c, g, or t
  misc_feature (1074482)..(1074631): n is a, c, g, or t
  misc_feature (1084434)..(1084583): n is a, c, g, or t
  misc_feature (1102479)..(1102628): n is a, c, g, or t
  misc_feature (1108570)..(1108719): n is a, c, g, or t
  misc_feature (1113530)..(1113679): n is a, c, g, or t
  misc_feature (1116391)..(1116504): n is a, c, g, or t
  misc_feature (1133793)..(1133956): n is a, c, g, or t
  misc_feature (1159209)..(1159358): n is a, c, g, or t
  misc_feature (1183821)..(1183865): n is a, c, g, or t
  misc_feature (1207271)..(1207420): n is a, c, g, or t
  misc_feature (1252230)..(1252379): n is a, c, g, or t
  misc_feature (1255026)..(1255094): n is a, c, g, or t
  misc_feature (1256281)..(1256430): n is a, c, g, or t
  misc_feature (1259422)..(1259571): n is a, c, g, or t
  misc_feature (1266498)..(1266647): n is a, c, g, or t
  misc_feature (1288953)..(1289052): n is a, c, g, or t
  misc_feature (1291564)..(1291713): n is a, c, g, or t
  misc_feature (1314568)..(1314717): n is a, c, g, or t
  misc_feature (1326835)..(1327247): n is a, c, g, or t
  misc_feature (1352733)..(1352882): n is a, c, g, or t
  misc_feature (1367959)..(1368108): n is a, c, g, or t
  misc_feature (1451100)..(1451249): n is a, c, g, or t
  misc_feature (1546359)..(1546508): n is a, c, g, or t
  misc_feature (1556987)..(1557136): n is a, c, g, or t
  misc_feature (1825135)..(1836134): n is a, c, g, or t
  misc_feature (1899091)..(1899240): n is a, c, g, or t
  misc_feature (1901382)..(1901531): n is a, c, g, or t
  misc_feature (1928486)..(1928543): n is a, c, g, or t
  misc_feature (1938762)..(1938911): n is a, c, g, or t
  misc_feature (1948982)..(1949826): n is a, c, g, or t
  misc_feature (2036834)..(2036983): n is a, c, g, or t
  misc_feature (2066537)..(2066577): n is a, c, g, or t
  misc_feature (2068131)..(2068338): n is a, c, g, or t
  misc_feature (2099409)..(2099477): n is a, c, g, or t
  misc_feature (2101930)..(2102079): n is a, c, g, or t
  misc_feature (2103992)..(2104100): n is a, c, g, or t
  misc_feature (2110956)..(2111045): n is a, c, g, or t
  misc_feature (2112162)..(2112311): n is a, c, g, or t
  misc_feature (2137000)..(2137149): n is a, c, g, or t
  misc_feature (2144273)..(2144422): n is a, c, g, or t
  misc_feature (2151824)..(2151973): n is a, c, g, or t
  misc_feature (2186006)..(2186155): n is a, c, g, or t
  misc_feature (2189689)..(2189838): n is a, c, g, or t
  misc_feature (2211646)..(2213003): n is a, c, g, or t
  misc_feature (2234707)..(2234856): n is a, c, g, or t
  misc_feature (2259741)..(2259890): n is a, c, g, or t
  misc_feature (2319798)..(2320561): n is a, c, g, or t
  misc_feature (2323399)..(2323724): n is a, c, g, or t
  misc_feature (2419526)..(2419675): n is a, c, g, or t
  misc_feature (2671005)..(2671154): n is a, c, g, or t
  misc_feature (3021240)..(3021389): n is a, c, g, or t
  misc_feature (3040215)..(3040258): n is a, c, g, or t
  misc_feature (3041342)..(3041447): n is a, c, g, or t
  misc_feature (3056490)..(3056639): n is a, c, g, or t
  misc_feature (3068603)..(3068752): n is a, c, g, or t
  misc_feature (3131200)..(3131579): n is a, c, g, or t
  misc_feature (3136870)..(3137019): n is a, c, g, or t
  misc_feature (3138065)..(3139235): n is a, c, g, or t
  misc_feature (3145790)..(3145939): n is a, c, g, or t
  misc_feature (3163068)..(3163574): n is a, c, g, or t
  misc_feature (3191713)..(3191862): n is a, c, g, or t
  misc_feature (3335101)..(3335250): n is a, c, g, or t
  misc_feature (3338156)..(3338305): n is a, c, g, or t
  misc_feature (3377833)..(3377982): n is a, c, g, or t
  misc_feature (3424848)..(3424997): n is a, c, g, or t
  misc_feature (3439805)..(3439954): n is a, c, g, or t
  misc_feature (3448104)..(3448253): n is a, c, g, or t
  misc_feature (3464040)..(3464189): n is a, c, g, or t
  misc_feature (3603053)..(3603202): n is a, c, g, or t
  misc_feature (3747443)..(3747592): n is a, c, g, or t
  misc_feature (3788888)..(3789037): n is a, c, g, or t
  misc_feature (3818315)..(3818464): n is a, c, g, or t
  misc_feature (3823471)..(3823620): n is a, c, g, or t
  misc_feature (3846519)..(3846668): n is a, c, g, or t
  misc_feature (3853709)..(3853858): n is a, c, g, or t
  misc_feature (3861796)..(3861945): n is a, c, g, or t
  misc_feature (3872573)..(3872722): n is a, c, g, or t
  misc_feature (3896049)..(3896198): n is a, c, g, or t
  misc_feature (3913722)..(3913871): n is a, c, g, or t
  misc_feature (3926668)..(3926817): n is a, c, g, or t
  misc_feature (3934968)..(3935117): n is a, c, g, or t
  misc_feature (3951244)..(3951393): n is a, c, g, or t
  misc_feature (3982365)..(3982724): n is a, c, g, or t
  misc_feature (4019307)..(4019363): n is a, c, g, or t
  misc_feature (4024217)..(4024366): n is a, c, g, or t
  misc_feature (4051932)..(4051966): n is a, c, g, or t
  misc_feature (4055593)..(4055742): n is a, c, g, or t
  misc_feature (4061730)..(4061879): n is a, c, g, or t
  misc_feature (4066632)..(4066678): n is a, c, g, or t
  misc_feature (4095467)..(4095616): n is a, c, g, or t
  misc_feature (4105134)..(4105655): n is a, c, g, or t
  misc_feature (4111701)..(4111850): n is a, c, g, or t
  misc_feature (4214761)..(4214781): n is a, c, g, or t
  misc_feature (4329412)..(4329561): n is a, c, g, or t
  misc_feature (4399393)..(4400413): n is a, c, g, or t
  misc_feature (4400797)..(4402078): n is a, c, g, or t
  misc_feature (4417332)..(4417481): n is a, c, g, or t
  misc_feature (4446312)..(4446461): n is a, c, g, or t
  misc_feature (4646252)..(4646401): n is a, c, g, or t
gaaagagttcattttataaaataatatatactaccatttaaacgttataatcattctggaaattataaaagcatttaataactaacttgaattacttatattaataaggaattacctctaaaagctgaaagttattaatttgattagtactaaatttattaaaagcgttatattatgagaaactagttaaatatctgaatactttctataaaatactatgatcactatttcaaaagaaagttgtcattttattattaatgattttctaaattattctttacttatgagaatttaatcaagtaggtgcttttaaataaaaggctttttgtagagcttgaagtaaaaaaaagtaaaatctgaaaatattctatactaacttctttaagtattttcgttacttttaataaggtattcaccgtacttcttcccatattataccggtattgtactcttctttttctactttaatcaatgtccaaattctagatttatatattagcattaatacatcttttaataattttaagaattttataaactcattatattacattttttaaattctcttctaacttatgttatattgaaaaaacgcgtaaatatatttggatcataaatatttattaagtatataaatcattaattttttaatggttaaggtaatgtattttccaaattatatatgttgttttgtttgtataatataaaaaaataatgaatatataggaatttgattttgtaataaataataagtttatttctatatttgagaaagaacatttttacataatatgaattaaacaatttgatatattaatttggcttttatataacaggggattaattttgtatagttttatgcagggtttataacgttatcatttgcggctactttagttctttttatattagtattaacttcaacgttgtaatagtggataaagctattattcctatctcttatattaaactctggcgctttgatttttaaaaaataaagtttgattactactaacaattattatatttaatatcgatatgtttaaaaaagaagattgttaaaaaagtaccaaaactacttatagtcctcttcggagagaatattattaaacagaaaaaattatgaaaaagattatttataatttatgtaattaaattatcataaattaaaatactataattatataaacttcattattagaataattgaaatctaatatacaattgttttttatatttttgaattggtaccattttataattattataaagctaacgtacattataagcgagtcgcgcactggctattgcgacgcgttctctctacacttaacatcatacttctctacaacttaacatgccacctactttaaaagaagcgagggtaatcttagcccttaaagctctccaaaaggatgaaaaattaagcctcagagccgcggctaagctctataatgtactaccaacaaccctccgcgaccgacgcgctggccggcctgcacgacgcgatactacgcccaattcgaagaagcttactcaatcagaagaggatgctattattcaatacgttattgagctatatgcgcgagcttttctactaagattgcgtagtgtagaagatatagctaattaactattctacgtacgtaacgcgccccctattagtaagctctaggtatataacttcgttaaacgctaattataactccgtacgtgttttacgcgtagatacgattattcaagagttaagtataaagatttaaaggttattgctgagtaatttacgctcgtacggaatactaaggtttagtacggtattgtagataataatatttataactttaacgagattaggtttataataggtattatttttataggtacaatagttataatttcggacggccttaaaaaggtaatactaatttagtttaataatcgtaaataggcgattataatttaagaagttaatacctttagttaaactatccttacgtttattattttagccgtatagtactactttactaattaatatattaagtataatttcctaaccgactagtatatcgtaacgattaataataattaaactattaatataataagtttagattaaattaagtacttcgattactatattacgttccgtataaaaagtaaataccggttattaattttcgatagttacgaaagctattattaaaccgaattcgaacgctattattaataaaataatattattacgctctatatacctctatatttttcttattacgtttagttatttaatattaattactttaagctactaaagtaagtgtatgtcacggcttgacactttggtggggcgcggggcgcaccacgggccaatcattagtacaggagcgaggaccaattaaagcaggatcattgggatcgaggatcgatccagaagagtcaatcccaaaagggacagtatcgataggatcgatggtcgagtcaatcgatccaggatagtgctaggcttggcacagggtctatatatacggaggaactggctggtgtagatagacagttccgcagtatgtaatttaagcttgtattcacggtatttagtgtttacattgagacatcttgttatgcactatttagctacaccgaaccaattgttagaagttacctttaaccagtatccctttcagaggttctgtacaggggttcgtcacacgttgcatactcacttcaactctgtcacggataagttaaaggcgtctttttactaccatggcccaacccgagaacgttcagatgggaggcgtcccgcctagcctaactatcgagggaccttttacggcagacgccaggttcagggtcaccacggctcaatagcttatcgatcgcgttaaagagtttaaagccgaagcccagtagactagggagcaggttcttgctctctcggcggctaggcccacgcacgtaactaagttcccggcaccggagcactatagaggcggaaaggcagagcttaaaggttttttaatctagtttaaaatttattttcgttactacccggaatagttcgatacggaggagtcgaaggtagtatacgtagctacctggcttaaggataaagcttttatttagttcgaacctatttttaacgactattacgaggtagtggcggaggaccagaaagagattactgtccagtgttttcggagttaccgagccttcgaaataaagtttaaaaaaatatttagggaatataataaaggtaggtgcgcgtaagagaagctcgcgaatctacggtaaatacgttcggtaacggaatatattatttagtttaaaattaataatttacgtaacgaaattaacgataagggattaatataaaccttttataatagccttaaagaaaaggtaaaggacgaattatataaggaggaaaggcttaacactatcgataaatatattactatagttatacggatcgataataaataattctaacgtcgtgcggagaagagaaactataataatcggggttattacggaaattaccgctctaacgataaacgtaagtagtaatatttaactattaattactccggtactatatattcgggacttataaatatcgacactatatagtaataaaggttataaagctagggctaaagtaaagataattataagtattttaattatagtaaagtaagatactttaaaaaggattaccgggcacttaagtaatttaaataaaaaaaagaggttaccgtaataattattatatcgaagggaccgagggttatagaagtcgtagctatcgggtattaataaagtaaaataataaacttcgaagaaaactttaattaatataccgaataaaaggaaatagagttttaggggctacgggaagtaatggaaaggctaaaagcaaagtataaagaaaaaaacctttaaatattaatattctagaatcgattaatataaattactatagaaatcgctacgaaagttattaaggataataacgttatatagtaggaaggacttattatataaacgatattaaagaagtaatacggtaagcgtaggatcgttatttcgcaagaaatattattatttataaagctcgtatataaatattaagaaaaatattaaaaaggtaagaaggtcgctaatatcgggatcgcgaaattattaagaaatatatttatacttatataatatataccctataaaggaaatataatataattttattctaaatatccggaatatcggaaaatactttaattttaatatattatatacggatatataaagtactactaaaataaatcgctatacggttactagccggtacgtaagtttatactaaaatatataaaatactacgttaaatatacgaacggttaggatataaataataatatatatttttaggaaaaagtggtactaggttagtgcctaagcccaaattacgcactatatttataaaaaaaagttaaacgatattattaaataaaagtatttaaataaacgattaaataaaaaaaccgttatcggatatatatataaaaaaatattaaatatataaaagacggaaaataggaggaagctaggtaagtatagttaaaagactttatattattaaataacccggagtaaaaggatatttttaaacgatataactatttaaaaaacgattcgcggcccttcgtaggggccggtaatctttaatagattacgaatagtattttcggaagtattagcgtaaggcgaaggtataggataataatccggtactcgttaacgaggtcgttactatataaagaagaagtaaaaaaaaataaacgcttctaggttatagtatactaaaaaaatatttaggcggtaatattaatagacggcggtataaagacgaacctaatttcgttatagttcgtatactaaactcgtatactataaaagaaaaaaaaggaatggatcgttatataaaaattatttccgacgtaaaaagtctatagaaaaacattacctttaaatattatagtcgaaggaaaaataactttaattatatttaatattataaatataggaccctcgaaggatataatcctagggtaactatagcataaagactataacctagatattaattagaggaatagtaactatttataattaaaagaaccttaaaagtatttaattaacgataggagattaggcgtacgtatagagtagagtgtaggataagtaccttccacggtactaccgtaaggagcctaaaaagtaatagtatactttatcgatataagtagtaaaatcgaaaaagtaaagttaacgacgttggtagaaatatcggaggttaataaatatatttatcataattatataaaaaaaatagaaaaaaagtaatattaataaaatattgaagatatttaacctttacggctaaatatttagagggacttttaaagcgaggaccgtaggactacgaaattaaattaaaaaaaggagctaagctatagctatttaaagtttactatactaacgataaataaaataaaaaactataaaagtatttaaacgaaaatctaaaaaataaatatattagggagtctatatcgctagtaggataccccatattctttataccgaaaaaggacggtaatttacaattatatatagattaccgctagctaaataacgagacggtaaaaaatagttacccgctaccgttaatatctaagttacggagttaattaataagggcgtgatattttatacgcttaaatatacctatcgggtatacttatatacggattaaaaaaagagataaatagaaaataacgttttatataccctataattattttaagtatctcgtaatactatttaggctaactaatacgcccgtaacgttttaatctctcgttaattatataatccggaagtacctcgataaaataataatatactattttaacnnnnnnnnnnnnnnnnnnnnnnnnnnnnnnnnnnnnnnnnnnnnnnnnnnnnnnnnnnnnnnnnnnnnnnnnnnnnnnnnnnnnnnnnnnnnnnnnnnnnnnnnnnnnnnnnnnnnnnnnnnnnnnnnnnnnnnnnnnnnnnnnnnnnnngaatctacaataaaaagctacttactattatcgaaacgttcgaagaatggaggccctaccttaataatactaattataaaatacaggtctatacggattataaaaacctataatactttactattatgaaggtctttaacgtatagtaaacgcgatagttaaagtttttttcggaatttaatttctagattaattataaaaaaggttcggagaacgctagggtaaacgcacttagccggcgggccgaccaccacaaagatacatccaaggagtcactactattacttaaagaaacgctaaacggtacttttaagtatctactatagctataaatagagtattacgtagtgtattgcgagagggctacttctagtaagtactaaaggaagttaggcagcgatattatagagtaatattaatagaaaaaattagagctataaggcatctaaaaaaatagttagggaagattatagtataaaaatcgagtatacgtaatgctaggtaatagaacgacattagtgacagagatttacggatcgaagttcggaggatatataagtatcgtaaagactatagaaaaaattaaataatactttaattaattaaggattaaggacgacgttaaagaaattatttaattatactatacgtataaaaaaacgagggttacgaagtataagccttatagatttctagagttattattaatagtaaaacgactataaagtttaattacgataaattttattactaaattactaaagtttaaaaatatagtaattagcgttaagtataataatatattaacggtaatcgataagcttactaaataagtatacttcttattatataaagaaacctaatcggtaaagtaattaataaatatagtactataatatattatattaatatatatataattaaaagaatttattacggaccgcgatactaaatttatattaaagttttaaagagcgttaataacgaggctcggggtaataagtaaagcgtctttagcttattacccttagacggacagttaaacggaacggcttaattaaattataaaataatatttacggaattatattaatttcgagtaaaataattaggttaaacttttacttatagtataattaatatataatatattattaattaaaacgactaaagttataccgttctttgtaaattttaaatataaaataaacctacggtagggacctagcgttaaagtacctaaggctagggttaaagtaaataaactatatatactctacggtaagcttaagtaaaaactggaatttataaagaaaaggatacggaaatactataatactaaaagacttaaggaacctcgctttaaagggggaaatataatattcctttctatacgtaatttacgtattaaaagacttagtaagaagctagactataggaaagtaggcccgtttaaagttaaaaagaaaatatcggagacggtattcgaactaaagttacctagtacgatacgtctacggttatatacttttcacatttcacttctggaacccgcaccaccagcgaataaggctaatatacaggtagtagcggaggataaagaaaaagagtacgatatagaagaaatactagatttacggtttaacagaggttaattaaagtatttaattagttaattaagatatccagccacaaataactcgtaggaaccagaagcatatcttaactacctagataagcaaaaagcattccaccggtaatacccggaccgaccaaaacctaagtaataaaaagatctgtgcctaagccacggagaggtatccatgaacttagatacaaaagaacctcggcaggaatcgaacctgcgccttcgacgtggtagccgacgtactacacactacactacaaagttagaaagtatgaaggggactaaatataagtagtaccacgcgcctcaaccaccctagggaggggaaggcgcgccgacggcaacatcttgggcggccaggaaggaaggaccggccacgcccggatccagggagaagttaggtgaccagtcgaagcctgaggcaggacctaggaaagagaagtcggaaggcagggtattggaagactctgccgtgggacggccccggggatctggagaggcgggggccggaggaggaggaggaggagcgtcgccaggcggcgagacagactgtgcggccagcgcagcttcctcctgctcaacacgctccagctcttccacactgttaaggctacgggagacggccgcagccatccgctcaaaccacattcgtttctataagcgtaggcggttaattttctaatccaaggccgcgcgttggggactcggcctctaccatctccgtctctaactaatcgtgttgggagatgaccttacggaagctgctggacggacaacccacgagcgtgcgccaaaggggatttagttatactggtatataggaagcgcaacgatcgggagaaccggaaggggggaaatcttgcaggagaagccacgcctctcgtaaaaggaacaaatacgctttataataatggcaaaccgtaagatagtagcaagtagctcgtcacgatccgcggttttcgagtgcaaaggtttaataccgggtcgcgccttacttacgcggttaaacataataaagcataataaataggggaaaaaggggagaacttacaagcgttggtagacgtaggagagtaggctaggccgacgggacttcggcctaggagggggagcgtcgtgtcacggcttgacactttaatagggcgcggggcgcaccacgggccaatcattagtacaggaacgaagaccaattagagcaggatcattaggatcgaggatcgatccagaagagttaatcccaaaagggatagtatcgataggatcgatggtcgagtcaatcgatccaggacagtattaggcttagtacagggtctatatatacggaggaactggctggtgtagatagatagttccgtagtatacaatttaagcttatatttacggtatttagtatttacattgagacatcttattgtacactatttagctgcaccgaactaattgttagaagttaccttcaaccagtatccctttcagaggttctgtacaggggttcgtcacaatgtataattatttaatcgaggacttaatacgtatatatattaattatattaataagttcgagttcctctatactttccgggagggttttttcgcctctaaataaagaagaatatatagggtagctttacgggtactagccttacgccgtacaatctaaaaagggtattttttaaactaaatataaagctttatacgttaatacccccgaccttacggcccggcactctataactttaggtattttagatattataaaacccccgagaaactaatttatagtctacgcttattaaaactcgaattattaattattaaaatagcttcacaactttaatactagttactatggactagcttactaagggtataatggctataatatataaggtgactctccttcggttagaggtctcttcgctctgtaaagctaacgaggtattaagtaagcgccggagagccaaaaaaatatgggtgtagcacgaaggattatttactgtgtaagatgtaaaggatatacctgactagaaggccgtgggtgaggaggcagcgcaagaaacgcagcaggatggcggtagtgcaaggggggctcgtacgaagattcggtgctgtggtgtgtgcggcaagcctggccatactgcacgtacgtgccaggaggctgtagaatcgtctgatttatctatttccgatggaattatcgtggtttcttagtattgtggttgtataattgagggtagttattgtagggtaacggagagtgcgcgactcgcttataatgtacgttaaggtttattaggtttgagttaatattatattttcaatcattaaagtgtatatatatatatatcaaggaggttttatacgtaatttacgtactttccaaaatgtctttaccctatcttacctataccctacttatcctataacccttcttacttttgttattagctatacccctatccctactctctcctcttcagctttaatctctacttttcaataactctgatttggtatcctacttaaaaccgtgtaaaattacatttttcaaaaagctctatattatactattattcatttctttccataaaaatctttatacaaactctttnnnnnnnnnnnnnnnnnnnnnnnnnnnnnnnnnnnnnnnnnnnnnnnnnnnnnnnnnnnnnnnnnnnnnnnnnnnnnnnnnnnnnnnnnnnnnnnnnnnnnnnnnnnnnnnnnnnnnnnnnnnnnnnnnnnnnnnnnnnnnnnnnnnnnnnnnnnnnnnnnnnnnnnnnnnnnnnnnnnnnnnnnnnnnnnnnnnnnnnnnnnnnnnnnnnnnnnnnnnnnnnnnnnnnnnnnnnnnnnnnnnnnnnnnnnnnnnnnnnnnnnnnnnnnnnnnnnnnnnnnnnnnnnnnnnnnnnnnnnnnnnnnnnnnnnnnnnnnnnnnnnnnnnnnnnnnnnnnnnnnnnnnnnnnnnnnnnnnnctggaaaaaagaaaatgaataagactcaataaaatataatagtatattgtttaaaaatattgtataaaataacatataactataatacacattcttagaaaaaggttcaatatatttaatgaagaaaactttttactatataaagttcaattcttttttaatatcattcattacgagacttgaaagtatgtaaatttgcactatataagtcttaatttaataatttaataatttaacaatttaatgatttaatgatttaataatttaataatttaataaaaataaagataaaatctttttgctattatatttttcatttttctaaatatagaatactttaaacctgataaatctcaaatcgaaacttatattaaaaattaatttctataagcaaaaatctatatatgtgtactatttaaaaggtttataattacatatcattaatttacgtaaaattaaaaagacctaaaatgattaatagattttttaaaacatattaatattcgtatactttaaaacataaaaataaaaattgatatttacaataaacagttaaaataaccttaaatgataattttctaaaccttaaaaaaaagctagataaaaaaaatgcgcattttgttttataaaaatattacttggtataaaaaattattatattgatattaagaaatatttttttcatcaaatattaaacgcccttcttaattattatatctaaattgaaattttaactgttaaatattatattacattaaaaattcattttatttttgatatattagaaatatctaataatttacataattcgacaagaatgttacttatttttttcaagaataactagtcattctcgaggaaatatttatgattcaaatagatttaacattttagtttcctgattgaataataagtggaattcttttaaaaaaaaggtttataaagacttgaaaactattagaaagtctattaataataccatacatgttaagattttcaagattttcaattaaatgaaatgattatattaatgttaaagtcttttcttattaaaataaaagaaacagctacaagattaaaatgatatttggttagtagaataacgtctaattagttaattattaaaagtaataaaaatactcaaataaaaactggtagacagacattttataaccttaaatttctttactttaatccttataaaaatttttacggtttatatatgcctaactagctaggtccttataagtaacagaaaagtagtatagttacttaattannnnnnnnnnnnnnnnnnnnnnnnnnnnnnnnnnnnnnnnnnagagagagaaaagtgctagctatagctaaaagacacctaaagctatagtataaactttttctggctcggagtatactagtttacctagactagtggaaccttaacgttagatatagggatctttgataaaactctataagcttataatctatacctaagatgtaagccctctacctaatactctagaagtaactacttctcctacactacggggtccgcaagtgtcgtctttgtattaattctatataccgcctctattagactatcttcattctacccggatattccacatcctgagctaactactcgtgcgtagtctatacgaccagcaaccccgctagtcttgtcctcaatcccattcctcttgtctcttacttcctgttctcctctttcattatacctcctgttctcctctttcattatacctcccatttacgttctctccccggtcttccttcgcgttcttgtttgcgcagttgcacaaaccttctcgctctggccatgggcgcatagcaatataattgctgaagctacccccgtatgactcggaccaccaggcgattcatagaacggcggaaagtcgtcgaaggtgacaccagaagccagatgctccaacctttcaccataatcagatgttccaaacccatcaaacctcaacttccacgtggtagagaacggcaccatctcatcccactccggagtcaggtacgtgtctgtggccggcttcaagattcggtcactgtcatatactcctttgagccttgacctttcattcaccagcgacttctctttttccaatctctcttcggggtgggcatgtgacagctcctgaagcagtgtctcaatctcgacggttttctgctccacagcagccttgatactttttacgcgctgcggggccataaaattggagaatccctcgtacgaggagtcgagcttgatcctcttgagcttgccttgagtgtcatgtccacggcgtaggtttttgagttgtgccaataccttgatcatggtaaccaagcctagaactgccacatgtttgggctggtaggtggcaaattgatgcgaaaagttggattggtaggtggggagctcgtcgtcccagcaagatgctgtcttattgctcggggctgtatgaacgtcatttgttttgactttgtttgcgtggtggtagaatacaacatgtcagtcaaaaacttccaggtagctgttatcatttcagttttgtcggtaactcacaatgtcacaaataatagtgtcatccggctgaaggctgagaacagtcccctcgcgatcccctaacttgacttggatattcccagtggcgacgcgaacggctggtagctttacgctggatcgctgggcgttgagaaccagagtcctgagtgcctcgtcatcgttatcactgccattggatactgcaagctcctggatcttgagccagtcgcaagtggtttggccggcaggctctacttccctccgctcaagctctgctctcagatcgtatagatcatcgaggaacatgctgagaacagaagtaaatgccaacacggaggtgtaagcgctatcaagacccacgagcagatatatggcacggctttgcccagctcaggctcatttgtcagtatgtgtgttgcaacagtcagccccagtgttgtcattgggttggtgtggtccctgtgacttccgaagagccatcgtctgaaagaagaaatcttccttgtgatcatgctcttgttggcttccattatgatgccttcttccaacaccagcctgtacagatatctcatggaccttttgaaagctaaacgccgcttcagcaatcttgtctcgtctgcattgtatgagaggtatacttggcagtttgtaatgtgttggtagagatcgttctcggaatattttgccaagcggttggcttcgcttctgaccatgtggcccaaccccaggaaatcggcgacgtatctggttacggctggaattgcataatctcgcgtagcatccaaagaatagattttcccgccgcctaaggggtccataacagcagactcacgcctgatgatccccctcatgaggttggtgaagtactcagcgagagctgcagaatcatctgggctctgttcaaaatgctcctccgtcgaggccttcacagacggctggcgtgggcatacaccaccaccatctcaggtggaagatccagagtgtccaaccgcacaggacgaacgatgacattggattgatcttggaagagcgatctgattcgcagtgcatccttcagatatactggtttggagggctttcggggctccgatggtttggtatcgaaggtgtacttgatctacttaggaatgccaagccagttcttctcgcccgcctcggctgtcttgaggttcatgcggaactgtttaccatatcttgttcttgtgcgagttgggaattcttctccgaggtgtaaaatggatggaaaaaccggatcgaatcagctggaaaccactcgggaaaagcgcgctggagaagctgatggaaaacagagcttttgagaacgtcgttgtccggcgtaacttcttttattccccatcaagtaagagagtctgtgttccaatccaccgtgtagaaccgatcggatctgaccagcgtgactgcgtcggagaatatggcagcccacaacgccgagtcaacgtcgctcggtcccggatccccattcatcgcgctgtcagactcgcaaaagacatcaggataaagctcgactttgtcagggtgctcatacaagtcgcacagcgccttctgaacagcagggctcttgcaaatgctctcaaaggtgtcgtgacgcttgagcccgaagaattcacggaaatcattcaaagtgcccacaccccatttgcgcgcctgatggatacccattgtctcgacggccctgaggcatcgtggcacattgttgggtccaaagttggctgaaatattaccgggatcgttagcatagctgtctggtttccaacatggacagcaaacttaccaattgggtcatccatcgagtccagcagctcgtcaaccatctcttgatcatcaaataacccggttaagctgttgcgcttgaagaccttcttccctgctgggttgcgttcattgtcctccctcaagccaaactccctctcccaaactggaagctcaggctcttgagccttcgcgcgagcctccttcgacttctgcatcaagttgacaaactcaggaagagtcatattcttcggggtcccacttgttgtctttgatgaagaacatatcgcgcatggagtcttcaacatatcgttcatccctggcagaaatggcgcaatggaagcgataaagcaagttgaattcaactgttacttgatttcccagcccgcgtgtcgtcgtttttgcagcagtctcgtggacgcgcggatcgagtgtgaagtttgtgtcataggcgtggaaacccatcagagcccgaaggtagtcatggatcgacactggatgtacaggccacatgtgatcaaccgcgcggtgttgaaaaggtcgtcgtcgagcttcttccatgcagcgtcatacgcgtcataaaactcttcaactatcttctggcagggggcgtgctcatagatgtatgtctccaaagccttgacggcttttgcaaacctcggagttgcatccgtccttttgccgttggccacaaactcgtcgtaggcctttgcatactcggcgaggacactctgatagtggctatcatcgtcacgtcccttgacaaacgcacaggcagctgcttggtgttcggtgccctcgaacttcgcaggtactgagaagcgcccgttttcattgatacggcgcagttgggtggcagcgtaattgtgatagcggttgtacatgacaagcatgatgcacactccaggaggctggcgcagcaggtgatcctcagcgaatgtgtcaggcttgagtagatcaagcctgtacttgtcgtctcgcacctgacgctgcatctcctcgttgaagccatagaggggggaaagatcgaggtaggaagatgtgtccgagatgttcttttcgccatcagtggttcgaaaaatgtcgtgtatgataatggtggcgtgataaatcagcatgctggaaagtccagaagagctgttccgtgcttccttgcctctggccataagtcggtcaaaaatgtcaccgggatcgggaagggcaccgagtgggtgagtcatggacggcacggtcttggcgtaaggggctcctgcctgtccgagatgggggttcagggcgctgttgaacttgccatcggcagcacggtacttaaaagcatcgcctaggtaggtcaaggggggatggagcatgcggtcgtacttggtcttgacttggctctcaataaacttggccctggcctcactgtcgttcgacatgaagcctatcaactgggctcctgctttgatatccaaggtcccatgctttagaaacatggccacgacattcttgattctgggaatgttcttcaaggtgagaattctatgtagatcgtcaaaggcaccgagcttttgagccgccttgttctatataggggttaacgcctacttcatgatacgccatgctacaggcatgttcgacagaatactcacaccgataagtgtatccccgtgaaacccagttggcaattccgttgtgctcaggcttgccagctgcttatccagatgctccagctcttgttgaatttggctggttttctttgccgcaccttggttgacacgactgtttctctggccgttggctttgccatttccatcagtatgaccgttggtagagaaaagaggtctttccgagtgggacgacatggccgaaaagtgacagtagccccggttgtacctgggggacgaccaaatgcttgtgagaggggcaagcaaacagcgaagcaatcgctagctaataatctgtgaatcaccgaagaagacaaacgacgccttggaagaaataaaaccacaagaggggtaggtaggtaaggaagcgtgcatatttagcagtgagtccaggttttctatttgactggagcagtcatgttgtctacagctaccggcccttccaggcccaagagcaatactttcccgtttaaggatccaagacgttttcagcttcgcgccccatggatacggatgtgggctgcaaccattgacttcatgtcccaacatcatatgtctgatttccaggttgggaagtgtgatccgagctgagggttgcctatcgatttgctcgagtgcctagccaatactttcgccgggcaagctgaatcatgaatgtcgcgggggcggtaactgagagcgctcaactcgaatccagattagcccagtcagtttcagctgagcctagaactgggtgggtgcggtgactaggcaaaacatggcttgctttgactagctgtgctgcaacttgcatcaagccatgctacacatgaagcacttgttgggttcggaagacacatggcgataagggatgggcatcagggctgactggaacgcaacccggcgctcccaccattgaacaaactgtatgcatgtgctaggggaatattactataggaggctgggcctttctgattgtgcatgagtctctcgctgttggtttcagactcggtcgattttggcaaatgagttgatattgttcccacgagtacttcccaaggtggacattgctcctggcgcttgattttgccattctctcctgcgccctgccaagacatgaggatcagggaggtacctaggtattgtagttgtctaggtgcctacgtatctatgtatgtcagatgggtggcttcatttcttccggctgaccacaggcagccaccctgctgtccatcagagctactttccaccaccgtatctaccttaattactgtaccaatagcccctatccagagatctagacaggttatcaacctttgcatgttcaagtgacagccccaggcctgccctttcatccttcactccacgcaccctggtattcccagtcaagctcaccttatcttcctcagacctttgctgtcgattctgttacacacagtcccctcgcctgccatcatgtccatgtcaacagctgccgagttaaacgatgttgcagtgggacaatacacacgaccaaagccaaccgacattcgcagcccttgcccattgttaaatgcccttgcaaaccacgggtatcttccccgcgatggcaggagctttcaccaagcagagctttcggcagccctgaagaaggtcggcctgtccccgacacttcgcctagtactcagcaaccccgtgtttctcgagcatcagacagcagcgggaagtcagcagcagagaccggcctcttcatggagcaagctgtggtatctcatgcggaatccgtgggcaatcttcttctcctttttcggcatgcgcaggcccggacagcaggacgacagcggcgaaccggtgctcgatttggatcagattgggctccctggggttgcagagcacgacatatcccttacacgtcgcgatgttgcccaaggcgatcatctgaaggcacagccggatttggtcgaggggctactggcatcctccccagatggcgggaaaacgatgcgtaagcgtcggatggatgcgcagaagcaagacaacccagggctcttgtacggaccgttgcagcatcgcattatgtggggcaccaaagggcccaggttttcccagacccacaccggtttgctcttggggctggattttcttactgtttactttttaaccaacaaccaactactgtaataccaatttgcttaccattttttggccattttagcctcattttcgcagccagtgactttcctaggtcgccagcccaacaggttatgagctcttttgacgcttaaatcaccaagcaaaccgaagtcgacgccctcgtcgacaacccgacctcgcaaggccgaataccacaccggaccttacgacttttcgacccttgtcaggccaatatcacgcaattggacctttcgacggcgattttggaggcgttgagagagttaaccaacttcccaatcaacggaagcctggtttaaaccctgaccctcatcttgacgaannnnnnnnnnnnnnnnnnnnnnnnnnnnnnnnnnnnnnnnnnnnnnnnnnnnnnnnnnnnnnnnnnnnnnnnnnnnnnnnnnnnnnnnnnnnnnnnnnnnnnnnnnnnnnnnnnaaccttctcctggccaagtttccttggttctgccatttttgcgaccttttggctgggaaattactgttttccggcagcagtcgagaactctgtcctgccttatcaggagaccgatagcggagcaagcatctcgccctctgcccaagtcaattcaacccactgttggcggccacaaagtcaggtggcgcctttctttgagtctttctttcgacgtctttctcacagcgtctttcttacgacttctctttgaccagtttttctttcaagatggctggcactaacgtcaccatggcccagctcttggagcttgtgaaagctatggggaatgccaacaccgtcgctacggttaggcaacgaacctttcaagccttgccggctctgaactcagagaccgatctttccggctgggaatttcagttaacccagtcccttatgtaccatggcttggaggactacatcaaggctaatgtacagccaccagcggaagaagggacacctgccttcgaccaatagcgtactaacaacctggacatccagaacctaatgatagcttccgtcaagaagcccgagatccgacaacgaattctcaacctgggttggaaggccgacggcattagtgcctatggtctataccagaagattatccaagccctacagcgcggcactttcgacatcgctggtatacttttggaggagtatttcactctcaagcgtaccaacttcgcctcattccaagcctacttcagccggctcgaggtccttcgccgtcgtcttgatacgatggaaatcaagatcggccacgtggctcacctctgggctgccctgaacggcatcaagaccgcgtaccccgatttgtacgaccggctagcaaggaagatggaagacggcaccatgacctggtcgcttctttgccaggagtatagcgccaaggccgttacggaggagaccacgccggctcactccaaaatcaccatcgagaccaccaaggccccggccgcgactttccagcacactggcggccgttactagtnnnnnnnnnnnnnnnnngctagagctgacggcgccagtgtgctggagagggcttgaggaaggcaaccagcactgcatgggctgtggtcgtcaccacccgaagggcaaggcctgttggtggtgtgaccctgacaaggctccaaaggattgggagcacagggaaaaggcacaagcggataggcaagagaggcggcagagtactggctcgtcaacagggactcttcaaggccatactggtggcgtcaccgatactgggtcttcgagggactgacctgcccaaaaataccctgatactgtccaacaacttcaccaatatatcgatcccccccnnnnnnnnnnnnnnnnnnnnnnnnnnnnnnnnnnnnnnnaaacggtatctcgagcggcgccagtgtgctggaagaccacgtgtactacgactccggatgcgcggatttcgtattcaataaactgaagtggttcaccgagctccacttactacctgatgggaaggaaaagaggttcctttcgtcgtcaggagatatcacaaagtgcagctaccagggtgccgcagcgctgcaatctaccctttcaagtggccaggtggttaccctggagctcaaggaagcggtataccacccacaggcgcccgtcaatctgatatcggcgggcaagctactcgatgaaggtatcttctgggaccaggagagccacaacctggtccttagaggtactaagcaggtggtgtgtgagttgaccaggaataacaacgtataccagatgaatacgacgcccggcgccgatttcagcaaagtatccctggcgaagactcccatcaaggccgtgatggcatctatcaactaccgggtaatgcatcgccgcctaatgcacgccaacaaggacgatatttacaaggcttgtacgcaggcgggtattaagctcgtcggcaatgactttttctgcgagccctgcgtgatggcaaagataacagatcaactaggctcatcgaccccttcgcagaccaataacccgttcgacttcatccgtatcgacgtcgtcacccacaagaaccctggatatctgggttacaagtactctatccaatacgtagatatgtggagtggctacaagtggattaacttcacagtggagaaaaagcaggtattcgataaggtcaaggatttcgagacgaagatcgcgcgccaaaccgggcataagatcagcatcatcggccttgacggcggtacggaatttgcccagggctctgggacctttgacaacagccgcatggccgcctgggccgaccaggagggcatcaccatcctcaagaccgtgcctcactcaccgtggatgaatggaaaggtggagagggccgcgaggactacgcttaaccgcaccagggctatcatgctggcctacaaggtgccagagaagctgttcccatttgtcatgcagtctgtggtttacgtgggtaacctactgccctcgagggtcaacgagggagatatcagtgctcacgagaagtataccacaaggctcaacatgcccgagggcgagcggaagccgtatattcggcacctacgctcgtacttttgcgacgcgtattactacgtcaagccggcctaccgggccaattcggataagttcaccgccagggcggagaaaggaaagcttatcggctacgcagatatacacggcaaaatatactgggtctggaacccagtcactgacaaagtcgtgaaggtcaacgccgtgaagttcaacgaagcgattcttacaggcctgacgacgatgagtannnnnnnnnnnnnnnnnnnnnnnnnnngaacgtggctgagcgccgcagtgtgctggaagcagaccattctacctactccgaaagctacgccgtcaccaacactacctccactacctgaggcctcagacgtggaagactttttcgacgccgaagaggtggaggatatacggtccgaggcacctatcccaccaaaccatgaccaagcaccctataccactgactctcctgccatgagagagctcacctcccctgcgaggctgatggggggggaggaggnnnnnnnnnnnnnnnnnnnnnnnnnnnnnnnggaagcggtggcttctccgccggctcaggagcggcctcgcagacaacaacaaaaaatcagggaccaggcttctacaagaagctacagcagggtaaacacccttaccaaggttttttcacagtacatctcgacaacccacgactacgtgaggtagtggcctacgccctatccacggtcaaaatcgaccaccttctgcaaaccatcaacaagtcccatatacccaggaactaccggcaagcgaggaagctcgagaactaccacaagtattggctgcctgccatgaaggagcaggacgccggcctgttggaaaaggacgtctacgagctggtggatacgccgaaagggctacaacgtcttaccgagcaaatgggtatacgatgagaagatggaccctcaaactggtgaggtgaaggccagggcgaggtgggtggtgtgtggcaactttgacagggactcctgggccacacaggacgtctacgccgccgttgtgagtagcgtggcagtcaaatgcttttgggctattacagccgtgaatgactgggagtgccttcaatacgacttcaagatggcatttctcaacgccaaaatccctgacaccgcacagtactacgtacgaccaccagatggcttgggcaagccactgggcaaggtgtgccggctcaaaagggcattatacggcctgaggaagtcacctatctactggtacgagacagtgaaacctgtgatggttgaactgggcttcgataccctctcatcagacctctgcctgttccgtcacaaagagacaggtgccctggtagtcctgtacgtggatgacctacttatatcagcgcctacgacgaaaatcattgaagatatcgctaccgggctggagagcaagtatggcatcaagaaactaggcgagccgaagaggttcttgggttttgatatcgtgaggaaccgcgggaagaggcaggtctacctgtcccaggtggcctatatcgacgccttactcgagaagttcggctataaagacatggccggcgtggctacgccgtggccagccaagctnnnnnnnnnnnnnnnnnnnnnnnnnnnnnnnnnnnnnnnnnnnnnnnnnnnnnnnnnnnnnnnnnnnnnnnnnnnnnnnnnnnnnnnnnnnnnnnnnnnnnnnnnnnnnnnnnnnnnnnnnnnnnnnnnnnnnnnnnnnnnnnnnnnnnnnnnnnnnnnnnnnnnnnnnnnnnnnnnnnnnnnnnnnnnnnnnnnnnnnnnnnnnnnnnnnnnnnnnnnnnnnnnnnnnnnnnnnnnnnnnnnnnnnnnnnnnnnnnnnnnnnnnnnnnnnnnnnnnnnnnnnnnnnnnnnnnnnnnnnnnnnnnnnnnnnnnnnnnnnnnnnnnnnnnnnnnnnnnnnnnnnnnnnnnnnnnnnnaaggcaccttttccggtacctggctgccaccaggaagctgtgtattgtgctgggaggctccgagttctcggcagaagatatgaagcttgtgggattcgcagatgcctcacacgcggatgtcttaccttggagatattccactggcggccacgtcgtcttcgtggctggtgggccagtattgtggaagagtaagaagcagaccttcgtcgccctgagtacgacggaggcagagtttgccaacctgacgcctacagggtattcactgcagtgggtgtcaaagatattggaagactgtggtgtgccacagccaaggccatacatgctgtacaccgatagtaagaacgccgaaatcacagttctgaaccctcagaatatcgctaggacccggtgtatcgatatacggtacaagtgggtgggtgaacaagtgaaggaaggaagatttggtattcaacacatctctgggttggagatgccggcggatggattcacaaaggcactacaaagggagaagcacgcaaagtttgtgcagctgttgggaatgcgagattttccggtttgagatatgcaggagaacgtgtatttgtatgggaaaaaggccactagggcattgggcaaaggagtcaaaggaagtggaagaatctgggcgtatattgggcttcggaggatattggcgatggcttcattttggacggcggtgtgctgtctgtgggggggtgtggggcaccaaagggcccaggttttcccagacccacaccggtttgctcttggggctggattttcttactgtttactttttaaccaacaaccaactactgtaataccaatttgcttaccattttttggccattttagcctcattttcgcagccagtgactttcctaggtcgccagcccaacacattagctgtgctgagattgcgcttgtgctctgtgtttttggagacgacaccaaagtcccgtgggaatatgtacgtgctttgtttgccgaggagagattgccaaccaaggaaggatggaagtcacgccgctggtggcgctcgctaggtttgatggagttgtcgaggacctcgaacagggttgcgcagctgatcggcgtgaaagttgaataaccatgtttttggctgacagtcagaagcatagatagatcaggcctcaagttatttagatacttgctccaggaactatcaatacatacgaccatatccagctgaaaactcgggatcccgtccgctctcccctggataagcagctgagagctgaactagtactcaggtgggtgacccgaggggaattctcggtgttgtatgtttttttgacgcaaccaaaagattgttgatcttggcattctttttgcttgctgtggtgctgtttattcttggcactgtgttacatgcagtctagctgacgagagcacgcgccgtcccaccgagccggcaactctattttgacctacctccatgtctccatcagattgtcagaagagaccaccatcacgggaacctgcgcagatgacacggtaacacacatcatcacaggatggcggcacaaatccggatgacaggagccaggcggccctggttgcatgtgagccaatcagctggcacaatcatgatttccccttttgctgcccgattacgtcgtatgggctgcaacttggccacggctggtgacatcgtgtgtcgctggcgcagtcagctgccgcacacgacaaggcacattgccagggaacagccagagatagccagcaacgactgccaagcggccaggccaagtaaagctcaaccaatgccgtcctgtcctgcttggcaccatgcatcatcgacaggtaggcacttacttggacactcacttgggttgggtgggatatataggtaggtatctttcccttcttttcccgtgtgtgtgtgtgtgtcgccccttctaactttgtctgcctgctctctcctcgccctcatcttgttttaaatagcaccagcatccctcccatatcatccgtcgttctgtcctcatgtcacacccacggcgaactcccgctggcactccacgggcccagtctattggctttgagaagcggacgcggagcgaatgtggttttgatgatgtcgagtcgtcgctggccccatttggcgtttcggcgtcccaaacacaccagggcaatctcaccaaaatcctctcttaccttggctctcgaaacccgttccctgcccagataggcaaggacgatattgtgtggctgctggacaatgttgcctttcgagcccagaatgggaactggcatgccgagtttgtcgccgccgcttttgaccaccaggcctcgcccaagttggtcgatctcgtgggcgacatcgcgtccagggttggcttgtccaaaggagacaaggaggaagccaccatcgagaaacgtattgcccccttcgtcatggaggttttgcccgggagacaagtaaacctcaagttcgacaacgctgccgatattcgtctagggccaggcgggaggaatggcatcagcagcgacgttaggaaggtcacagatggccaagagggggctgtcaccgtgtccaaggctgtcgtccctcagggtgtcaccggaatgcttgaaatgaagactgtttacgcggaacctgagggatgggccgtcatctcaggtatgtgattttcaattgcctactcggaattgcaggagcatgggagaagctgactccaaacatgatgtggcagatgtcgatgacaccatcaaggtcacccagacgagcagcccagtgggcattctacgctcgacatttgttgtaagtcaatcaacggagaagagcgccaagaggtagagttaggaaagactcaccattgcctagtcccaacccacaccaattcaaggcatgcccgagctttatgcctacatccagaccatggtgacaagctcagcaccgtggttctacctttccgcttctccctacaacctgtatcccttccttcgaaagttcagggatgattactttccgcacggacaacttatcctgagggattccaatcttatgactatctcggggctgctgtccaatcttacacttggtactgagaaatacaaggttgaccgaattgaaaaaatccatcggtggctcccacgacggaagatgattctcatcggagactcgacgcaaagcgacccagaggcctatggagacgcatgtaggatgtttccaggttggataaaactgatccttattcgcaaggttgaagatattgcggctgtcgggattcacgagaagaatgatccacaaaggtttgaaaaagcctttgaggaccttcccaggtaagactactgcctgctgatcttggacaagcattctgagagtaacttctaattgaaaaacagagagctatggcatgtgtttgaggatcctgccgagtgccaggagttgatacataagacggtaactgctggattgtgaagcgtttcagcgagcggcacagggaaggacttggactgcagtgggtgttgtccgccttttattacgtcaccataccaagttgagaaacatctcggaataagaccccgcaccgccttgctgcaactcttcccgagcatgtacccccgctctcatcccctcggtggaagaacaaacctgacctcactctcaccatctctccagcaatatccaatcttaccggaagcgtgacccctagccagtgacaatggcatctgaaaccccagccaagcgacaaaagtcttccaaggatgtgccataccgtctcatctactggcctgggtttcccggccgcggagaacatatccgtctagcgttggaagaagccggtgctgagtacgtcgacacggcccacctcgaggatggcataaacgatgttcttgcatacaacagtggtgagcaacccaaggacgaaaccaacatcccgctctttgcaccaccgattctgcagcacggagacctcgtcatcagccagacacccaatattctcttgtatttggggcctcgtttggggctggtgaccgacctggaaaatgatcctgatgggctgtacaggatcaacagccttgtcctcacagctcttgatggcttgagcaacgagccccatgactgccaccacccaattgccacaggtctgtactatgaggaccaaaaggaggagagcaagagaaaggccgaggattatgtcaaaaacaggctccccaagttcttggggtattttcaacgtgtgttggagtcaaaggccagcggcgacggtccgtggctctatggtggaaagttgacatacgcagacttggtcctgttccaggtacgttgcaccacaagaaattggttctcgtgctttgcgcgtgttttctgacccggttgcgtgtttcacagtgcttggacggtttgatgttcatgtttcccaaggcaacgaccaagttggagcgtgagggcaaatatgggaaggtttttgcgcttcataaagctgtcgcggagcgtccaaggatcgaaagctatttggagagctcacggcgagagaagtattccaacggcatctatagatactacgaggagttggattttgaaggctgagttttgctattcttggatatgcgcttgtataaatggagactgtgtaacaatttcaacgccaagatgataaatgttggagttgggagatgggtgtatatcgtgcctgtgtcgtcagctgaatgatgacgtattgatttgacatccatgattctatctctccagatattgcttcgcaagccctagtgtatttcagacctaagaccttttactttttcaaggccggaaataccaccaaagctgtacaagaacaatgctcactgtgccgcctgtacgtctaagatcctcttggttcacagcagctgcccgccttcattgtatcacgctccgcctggccgaccattcatcccgtcaaatacacgcaccccggcctaccctgaatacagttcgtcccgtattgggctcgacaagaaacaaaatgccgccgtttccaaagcccaacgaagagccacctgcgcacaggatggtgtactttcctgacatgacgacggcgttgccgtccgaatcaggagagtttcgtcgtgtgctttggacaggactgtactcgcaggttgtcctcatgacggtgccggtaggaggtgacataggggaagaggcatgtattacctcacagtgccgtcttggtcggggtgagtgggtgctaacgacagccgaggcagattcacacggtggatcagatcctcaccttcacttcaggcagaggtcttgcacaggttggaggagaggagcgggatatcaaagccggggacatggtcgtcgtgcctgcggggaccaagcaccagtttctcaatactggtcctaacccgctcattttgtacaccgtctactcgcctgcggagcacaaggccaccactgtgcacaagaccaagaaagaaggagacaaggccgaggaggagggacgggacgagcctcctgtctggagccagcggagcaagcaggagaatgaggaggatcgtccagtgggctgatgatgtgcaggtattgcatgaaagtgctggtggtttcgttaggggcactgtatgtcaaactggataagcatgacacttttataagctttatacactgctatgagtttgaagagacggtgttgtgtgatgtttgtataaacctgcccatcagggggttattgcgtgtcccctgcccaagatgacatttcattatgattgacgtcacataacgccaatggaagacattaaatcaaaactgaacgaggaaagtcaaaaatgtgtacatgttgttctatcaattcaaatttattgtacatcctggactgtcagtccattcttgaattactccaaatcgccaacggtaatctcaaactccccagtgagcggctgctcaacctccaccgtcgtctcgaccgtctcatctctcttgcgcttgccagctccaatgacggtgaccttggtgatcttgaccttggtctggaagccaaacttgcccttggccgtcaagacaccgcgggcgtagcggaaagtaatctcggtagtgcccttctgctcgacgctaacaccgtcatcaaggtagagagtacctgtggcagtgccatcggcaccaacgggcacgagaagctcaaagttctgctcgcggaccccggtggtggtcatggccgacttgacgcgggctggaacaataacaccgccccggaggaagaggggaatgtcggacagaccttgattcgcgaggcggatggtgcgaccttgaccctggatcttcttgtgggtgtagaaatcatagaagatatccttggggaggtacacctcgacgctggtggagccctcctgggtgacaggtgccacgaggaggccagggccatagaagtactggttctcaaggccgaacgtgttggcgtcgttggggtacaggtagaagacggggttgatgaggggggtgccgtcaacggtctgcttgtgcatggcggtatagatgtaatcgagaaggcggtagcggatatcaatggccttgcgggcggccttggtaacgctctcccagcggtagaactcctgcgagatggcaggggggtactcgttgtggttgcggtagaacggagcgaaggcaccaagggtggcccagcgggcgcagagctcctccgtggtcgagccagcgaaaccgcacacatcagcaccgaccatgggaacctggtagatggcggcaaatgccatcatggctcggatggttccgcgataagcagcccagtcggcaacgttgtctcccagccacttgccgactgaagcgccggcgccggcaaaggtggaacgagtgatgaccagggggcgaagaccgggacgtctggcaagcatggcatcgctggaaaaggttgacatcatggagccgtaaaggttatggacatcgtactcggcgaggccgttctcgtgaatggtgtttgtgttcacggtcttgttggagatgccgcccttgtcagcgttccacgaatccatgtaggcggccttgttgtggatggaatacttggggaacaacaggtcacgaccgggaagacccttccacttggtcacgggaccggcgtgggggttgctgagggggacaacatcccgagcagctggagccgcgatctggggcacttcatcgcgcttgcactgggtgccctctggctggaattcacacggccagcctgggagagggcgctcggagtggctgcgcacaggtggcggggtgggcgggaaaccgacggcagccgcgaagggatcgctgcaggggaagaagcaggggaaattggagggctcgttcatgtcgatccagaggccgtcgatatcgacaccggtgtctctggagaagaacagagaaaactcgttgttccagtacgtggtaatgttcgaagagaaccagtcaggaaagacggagacaccaggccagacgacaccaagatactcggatccgttgtcgcgcttgagaaagatgctgtcctcgacaccacgatgataagcaggataatcggcgtatccgacagcgggatcgaccatcacgatgtatttctgctggttcttgtggaggtggtcaacaagacttcggtagacgggcatcgggaacctctcggggtcgttggaaaatacccttctctggtccatgtagtcgatatctgtccacatgacctcgaggggaatctgggcttggctgtagttgtatactacctcggcgacctcatagatgtcacggtagccatacctgcagttgtggtaacccagaccccagtacggcatcatggcggggagtcccgcgacctcggcatactggcgcgcaacgtcgatcggggttgggccggccatgaagtaaaagtcaaacacgcctccgatggtgttgtactcgaggaactgtcctgatttgttcttgtcgatcttgatgtccatgccgttggagttgaggaaaaagacgccgtgagtgcccgtcttcctgtgctcgtagtacacgggatggctgccatacaaatttgccccctcaggcgtggcaaacgagtcctgggaccacatcgtgcggatgtagttggtggtattgagacggaacggatcccagtgctcaccgaggccatacaggttggggttgttgggaagcttggttctcaggcgcaggtactgggactcgaagacgaggggggcggcggatgtgtcaaacagaacctcaccggtcttgcgccggacgactgagaacgaaaagggattcgtcttgtacttgaactccaacaccgaccgcttagcgttcgatccagagcccttgggacgaggaaacacagattccgggacctggaagacagcatcgttggtgtcctgaatcttgacgtggatgcggttatctggcgggctgttagtgggaggaagagatgggcgccgggagttttgaagagatgcaggacacttaccagtctcgtaggtgacctcgagacggagtttctccaagtccgttccgtaggtgttgcacgcgcgaccggccagcgacaggtcggccgtgagcccggatgaggtggtcttgacgttggaggctttgtagccagggcactcgctcaaagggcgttcgacagtgacagcgacagccttgggcgcgatggcggccgagctgagcccggccaacagcccgagacccagaagacgaggtccgatcatgttgtccctctggcacgtaggatattcacacggacagcggcacctaggaggttgaccattggaacggcaagtaaggggttgggagcgctatttatccccgcgagggatgtggatgcacacatctacatcacaagcccaccaccccgcattctggttctgcggtgctcggtcatggcaaccacggatcatggtgacactgctgtcgatcccatctacgccattcttccactctcccctgtcgattaaccatatggcagggagttgcggtgcgctccgtcacgaagaaactccgcagtgtggacagaggaggtccatcgcggtcttgataggacctccgaatggcaaggcaaaagggccgtttgacaactcaagccagcgacatacagcagtatgtgatgttggtgaagcttggcacctagtctcttcaccggctctgcccaacgtcttcaacctggacggcaaggtgtggtggagcgagaaggcccgcttcttccccggccggtacggagtatgacatggtgagcgacggtcaacagccgttcttcttccccagaccagctttctccccgcaccatatttgcttcgattggcttgtccccccgagtctggtaggattggaggtggagccatcccccggcccgacaagaaaaccgttgtgccatgcacgccataaagggccgaatgcgggctggagaagccccggctagagccatgtccatcaccatcccgaccggccgcgccaagttgctgcagggcggcggtagcttcatctcgttgtggcccctgctgccgtgttattcgctctgatggccagttggttcagcgattgacggagaagctaaagcaggatcgagcgaatgtagatggaaatgtttagggcgaccgaaagacgtggaatttaattgtgtggtggtccctgaattgacaaactgccgtgctggtgaagggatagtagacacaacggatttacgtcgctagtaagatcgagctctgccagctcaaatgatcccataaaacccccttgacccttccagtaaatacactccatgttggggggaggggggctcgacgtcaacaggtcagcccaccgcccgatgtgctggacaacccaaaggcttcctacagtaaaagaccccaaatccctgcgctcaatgccagccttgatttgtattccgaccctgccctggaccccctaggacaaaacaaaatgtaccaaatcgccttcttgttatacatgccttcataagcggtgtcttgatattcgttccagaaatagaagatgctgcgagtttcgcctgcataccgacttttgcgaaaaaaggaaaacccattcaatccacctccatatcgtcagccatcggcaacgttatcgctacagtgatagacgggtcttcgtcctccctcttcccaccatctaccaaaaaagagttgttggtattgctgttgctgctgccgctgccgttgccgtgaccgttggagtccctctcagcaaccccgtttccattcccattcccacttgtaagcttgtattccccgtcctccagtcgttcaatgataccttcctccagcgcccaatcagacagtaggctgtcaacgcccatttgctgggcctcacccttttccatgtggcggccgacgtgttcggtccactcatcccaggacccgggtccttcaaaaacactttggcagtcttgtttcggacaggccgagcgttgtggtggttgcctcctcgtcaccaaacaagaggcctgcatttccttgacatgagtttcccattccacttgcagtttgctgtcgcccttggcgatggacttcttgatggcgaacggagcatgcatccgccgaagatgttgcgtgaacaagtccttgcggttgaactcgttgcctttgccatcgggactgctctgcggacaagaagagcatcgataatactgtagacacagatgctgggatgcgatgtgcctcttccactcatttttggagccaaatgtgctcgggcagccggcgaaggagaaggcacaaggaaagggtcttgtgtgggcggcagcgacatgctttcggagcgacgaggaatccttgaaaggtgcatgactgcagaggtcacaaagggtatcctgcttgggagtttgtttctgcaggggcctccgagctttggacttagcggtaggagtcccatattcgggggcatattgaatctcgtcggccgttggcccagccacttcaactgggggcgatccgggatcgccggcatgtcgcacggcgatgctgtcgcctattcgtgtgtttgagggatcgtgggccgataggccgtcatcactaacgtgacggacgtggctcagtgctttgagctgctctgccgcttctttcatttcagctgattcctccacctcttcctgggggacagcggaaggctgctggccttggggtgccggaggtggcgctgatatcgcccccccgttgaccactgccggttgtgaacgtgaatccgcctgacgccccggtgtttcctgttgaatggggacgaactgagccacagcttgctcgcgccgagtagcggatggactaccctttgcaggtgggcgggcttcgaacgccgtgcggttctcatctagctcttttggctgcagcgaaccgttggcagcctgatttaccagtcgctcgtagaggtggatcatattatgtgacccaatggagcccaggaagcagcacaccttgtcgtgctgaacaacattccacacgctgttgggcatggatatgagaagcatcgtgggagggcccaggaacatgccttccaccttgatttttgacgctgcaggaggcgtgttgtgaagccactgattaaaaaacgccatgtcgggactcgcgtcgccaacaaacgtggtacacaccaagactcttggttcgtcaaacgtcaggcccatcacctcctcagagctcaagggccggtcgtcacggccggacttccacgtaccctgaagatccgtgtctgcagactggggaggcgactgaagctgggcggctttggggtccagaggtaccagaatgattccatgccccctagtgtgggtaagcgtaaacaaagcaggtatcctttcatgggccacgggttgcttgctggccccgttggccagtctggccagagcttgtgcgctctcatgctgtctttgttgtcgaagatcctcgaataatcgttgagcactaaaagggcgattcgtgagactcagcttgtgaagtgtgtcggtcagagaggcggtaaatgagcgagggccgggctcaaagggggtctgctctggggtgtatgccgcaatggcttgcttggctacgttgctcccagccatgggcgcattggggatggcacatgagtcaaggaggagcagtatttcggactgtgcatcctcaaacaggcaccggacaccgtcccacttcagcttggcagcatcctcacgagcattgctagagcagagtattagcacatcgagaccccagcatcgagacctttgataacctaccaggcccagtacagctggttgtcggaaccaacatagccatggccagcataatatataatcaagagatgatctgggcgggcattgtccagaaacgaggccatctgaacaccgagcttgatgcttggatttggaaccgtggggattgcccacttgtcagtgtgatagttgtaacgctcaataaacaccttttccaacgccagcaggtcctgctccaccgaagtgtcatcctcccatcgcagcatgagcaccgacacgctggtatgctgtggcttcagtgtttgctggtggatgtgcatggcggcatcttggagatgccgagcaaaagcctcgaactcgtgccgctcgggtggcggcgcaacagtctcggtgggcgcatagtgaggaggcggaagctgtcgacaccgttagtgctccggcgggcaggtgaacaagggcgacgggatacgcacctgttcttgggggaaaccgtgtggcggaggctgcgcctgagtatgtggaggtgctggagccgggaccgggaccgggaccgggacggacgccggagcgtgaggaggcaggacgggtggatcggcgactttgggggcaagcctccggcgtttggaagaaggctccatggtggtggtggtgatggtggtggtgcacgaggacgactgttgggcgaaagcacggggcccaggcgcaacagccagagacccaaaagacacggcaatccgatgtgtgtgccgcctttgcggtggtcttagagaatgagagataccaagagctgagatggtggggagcaaccgaagggcccaatggttcggcagcgttcaaaggtgcggtagtagagacgaattgatagcgacagcgtcaacaacagcgacaacagcagacggcgtggtgggtgcgggaggagaaaggcgggcaggaagaatgaggtttgaggccgcaccgtcggggggtgggatgggataggataggataggtgggcgagcgacacacacacgcacacctctcacacacacagtaaggctgtgctgagctggaaaaggaccactcggctctggattagccttgtggcagggccatggcgctatatgattggctggcggtggcttgtcctagatggagccggcaaggagggggagcggggctgcaactctgccttgcggccagtcacaggccgccacaagagcgctcgagccacccggcatgtgtgatcagctggcaaggtctggcaaagacttggcttgggcttgggattgggcttggttctcctccaaccttgtcacttcttctcgtctctctcatcctcagcgttagctgtgttgtctgttgtctgtttctcttgtgcttgttgtgttgtattgtgttgtgttgtgctgtgttgtgttgagtgtgagtgtgtgtgagtgtgtgtgtgcgcatgttaaacaggtggaatgaagcactatgtaaggtaataagtagtgtgtaggtatgtacgatggattggattctcctcgtttcccatagacccatccccccccggtggcactgtttattacagcaccagcctggagccagatcgaatttatctatccgttgcatgcatgcgtctctgcccaactgccttttctcgctcgccttgctgctacaggcgggcttggtctggctgctcgttctgcgacggcgccttcttattcgcctcgtagctcgaccaaaagagacaaatcaggccagcaaatggggccatccatggtcatgcaagacgaggccggatcctgaccaaagctgcagtcttgcaggctcttcggccttctcattggcgcctgtcagccttctgcagcacgctgcctgcagcacttgattggcacaggtcagccattcaccacctgactgccaaggtagaggacggtacctatctttacaccgactccaaaccgccatccgagttgccaagccccccagcttccaacctggcgatggccctctcaacctctgtctcccagttgctcacccccacaatcacccactctagagccccgactagatacaacgcaacacactgcccgacccatagtccgacgagaccccatccgtggaaggcaaggtagatgccgccggggagcgcccctccgtagtagctgatcaggttcaccacagctccaacccattgccggcccatgccgcgcagtgcaccgccgaaggatccgttgagcccgtcggcgatttggaacaaggctacgtacggcatcacttcagccacgagcttcaccacccgctcatcgtcgttgaagattcgcccaaagacgttgcgtgaggccatgagtattatcaagatcaaggtccctgctatcgtgctgaggatggcggctgagtgagcagcccgggccgcccccctcgaattgtgtgcgccgaggaggtttccaaccctcgccgaagcagcgacgccgaggccgaacgggattgtgttgatgatctggtccgcggtcatgatgacggattgtgccgccagaggaattgtccccagacggcccgctgcaagtgcaacgatctcgaaagcccaccattctgtcccgacatgtacaacgcccatgagcgcaaggtgagcgaaaggtcccatgtgggagacggctcttcggacgtcaatgcctccccagcactccttcccccgcacaaaggcagcatacgccacgagcaagaggaatgaactccagtatgatatgccggtggccatgggggcgccgtacagaccgaatcccagccggtggatgaagagccagttgagcagtgcgttcatcggagaggtgagcaacagcacgtatgttcctggtcggtagatttctgtcatcgcgtcagtctggatctggacgtttcctctgagcaggagccatgctcaccttgcgcctgcaagtatttcttcatggcctcaaaccagacataaccgagaccgccggggatcagataccggagaaacttggagctctgtacgcagataaactcctcttggcctagagcgcgaaataagtgttcagaaaaggcccatatgatggccacaacggcatagaaagaggtcaagatcaccaggcctcgctgcagcaggacacccaggtcgtgtttgttggacgagccggtaaaactgcttgatgcgagtgtatccagagcagtcgtaccgccaagagcaatcagccacgccgtggccatggcgaacatgtacgaaaaggcggctgtagcaagagcctcgggactcaaccggccgacaatgagcaccgagactgtctgcaacgagttctgcaatatgtacgcgaggatgacgggaagggacgtgcgtgtgagcagccacaattcgtcaagccatagccggtattgaggcagcctgaagatttcggatgaagcagcgtgtccggtgtctgatgatgacgaatataccgatgccggctttgtcaagagggatgtcctttcgttcggagggtgatcagaggcctctgccctgtgggcaacaccatcctgtgccatcatgcacggcggccaattgctgtacaggagttggaacgaacctccccgatgatggtgggaggaaatgctcagatataaggtccggcatcttgagccggttgtttcgatgtcggagatctccagtcgatgagctggggggatttgtcgcccctttcctcgacagcctatagacattgcagctaagctgataaccaggccccacgcggagccaaacattggagaatgtagatgagcggactgtcctgctcgtcttgcaggaacgtcacacatctaggtacataggtacataggtatggacgtctactagacatggaaagataagaaagcggttaagccaggcaacgcccagcgaatctcggctcgcaagagagcactcaacgtatctaccagttgccgcggaggagctgttggacagattcaagccagaaagtaagatgttgcagctctctttactcgagcgtctggctgttgaggtgtgggttggcgttacaatctccaacttgtgcctacatccactttcagcattcaacggcctaagtatcaatcagttatcgctcaaatacagcgctggaagtaaagctgcgaggttgccgagaacgcaagcacgccgtctgttatctcagaccaatcccaattaaataacgtaacgattctactaacggagtctacccaatcagctctgttgaggtctgtccagcattgagccccaatgtctcgtcaatggcgatgctgctatcttgcttctgcacgtatgacggatgagtttggccaactgcagcatctcgttgaaaggttggagttaccactggcctttacgtaaaatagagctcgaggtttggtgccgatttgcttggtcgggagatgatgatatcgtccgccaacagcttgcaatcagacacaacaagtaaaactctagtcggaacaatacaaagagtatactgtcccatgattcagtttcgagggcatgcttttatttctcgtgattgtgacattaaggctgaccgtaacttgttacgaacccctccccctccgcatccccctcccccaacccagtaccggacattacctcgaaccaacacaccaaagctgacgtctgccaagcccccaccccttttctggcccccttggccccttaatagggctggccccagaagacaccagaaagtaaacaagtctcctacttacaatgggtcactgtgcattcgcccaagacggaccgagtcacgagttgaggcacccattatttgctctcagcacgacacctacctattcatggccacattgatcaaagcgaaaaaaagatggtatccgtgtacatgaactaaaagggggtatcgatgtccagaaacaaaagtgaacaggaaaaataagaacggctatcccaccgagcgttcctctaaaattttctttttgggcccgcctttttatcatattccaggcgcgcacttcacccggcaacctgcttgcccttgtccttcggtccctgccccctatccgatttctcccccccccgtttctccatctccgccccatcatctttttgaccctcgttgccaccgtccccagcttcaactccgctccctgacaaccacctctgcaggcccacggacgcgtccataaccccgccgcacagctcccagttctccatcccgatttgcagcaagcttacgttcagcatgcccttgacaaagtgcccgtggttgttcgagtcctgttcctgggtgctcgacgacgatacaagaggcagcagaatccagttgaacaccccgaggagggaccgccacgtggacagcggcaccttccatgtggtcctccaaagttgtaggtgctccgccggtgttacaatctgcttgaagggacggcggagcatgatggcccggctgtagaggatggcggcgagccggaccgactggtagatgtaatctggaggatccgacggcatcatcgccgtggagtgtgtggacgaggctgcagctcgggctggcgatggtgagccgtcgaggcgcagcacgctggagtgttcgtcgcctggcagttgcatgggacgaacaggaagtggagagtgttgctgctgcttcagaccaagaggccgacccctggtgctgctgtggtagtcgtctcccagttctggactaggcatggtgtctaatgggctaaacgttgctgaagtggtgctggcggctgatgacggggcaggagacgccgcggctgcggcagtggacaggcgacgtagcgccgggccctccacggagaggttcaccattctttcgtggatccatcctgatgtcgtatgcactttttggagctctttcgctgtcggctctgcgggcagcgcaaggacggcggcaaggaggaaccgcatgtcgtcgaggatagaggccacggcgccgtgggtgcgaagggcttcgccacaggatgcaaaagttgcgagtttggggataaaaggtgtgttgagcggcagacgcagcggcacatgactgttgtcacggaactcaaactcggcaccgccacgcaggaaaggggccgtttcagaggataaggcaatggccacatcggctctatcatggctcttttgttagcccagagtcttctgagcacagaaaagctcccggatgccaaaatacttacgtgatggcaagcttgctgatcagcccgtgtaaacccagggtacgaaatccgcctcggaccctgatcatctctcgcaagccgctcaagtgggcacgcaagtcgccttcgtttccccagtgcctgcggtgatatcagtacggttagcaaaatgacaaccgtcggagtcatcagccggacttaccactcgttgagaacaagctgaacgacacccgtgatcccctcgtcgctggtagacagttgcgagctgagatgcatgttgacgagctcaaatacttggcttttctgcgccatggccgccgtgagatcaacatgtccagaatcggcgaggaaacaggcagctgtgtagacaccgacacgctgtaggagccgcgactgaatacagtatggaacataatacttgatgtaggggttcgacgcatctgggttcccatctaacgatgccttgaactgggaaatgaggtttatatctggaagaagagccataaacaatcagcacaccggactgaaaatggcaccaggagtacatttgtgagtagaagccgcttaaacctacagaccgcaaacagatcagcatcctctagaataggcgggtgcctggctatgccccatggtatgttgctgtcgccagacatgctcggaggtaggggtgagttgtttgcccacccgctgctttccgagtcccatcccccccctccccacggatgaagcccctgccctcctgggtagtaggcacgaagggttttgacgacaccatggacagccgcggcgtgttgcgtacagccttcttcgcaggctgataagtgggagtagagaaagctgcgatcagtgctccaggcgtactggggagttgacggtgccgtgggagagtgtcccagtgtgtcgaatccgggccagccagcaagaggacccgttacctcttgccctggcgttctgggccatggcgaagcgagaggagaaggctgccttgggggtatcgaagagggcctgatgttttcgaccccataaagaccagggctcagaggtggtggtagaatggagatggagaaggcaggcgggtgtgttgctcccgctgctgctgccgccgccgctacggcgctcgatcgtctacaacttggcttgtaagcaactatcatggcactgaccattcccgtccatgtgatacaattgcgcacctgctgttgggcctgtactcgcagagcggttgggggtatcttctcgcgcagttgttgcatggctggccctggttgcactaggagaaacagccacagagacacagtgttagcagtagcgtttgtgacctagataagagtgaaaggaagaacagtctggcagcggcagcggcagcggcaacggcactggcactggcacacagaaagagtgcttggccttggcaggcttgcttgcggtgttcttttcgaatgagcggttaagacatggcatggaaggaaaagacggtgcctcactctttgcttcctcctcctgcactctccacacgacgtcgttgttctctccgcacgcgagggacgtggtggtacattgttttgcgtagggtcggacattacgggtatgctgtgctggatgagaagcttattgacggcgacacggccgtcaatctctgcattggcaagggatgatggctggttgtagggctgacttataacgctccctcttctttgggaccagctttgcaaagggccgagacggggtcgtcgggctcgtttatgcaagccttcggcgctgggagcactcgttgggattagcgtgttgagatgccagccgggccggttgtgggcaaggggtgactgggtggtataggggacgagataaaaaggtgtgtcgccccgcggctccagactgggagacatgagggagggaggtagtattgaggatggcagctgtgagcgaacactcctgataagaggatgagcacgagtagccagaccgcaaacctttgcctcgtggaaggttatatggactggtccacgatgtgatggaaaggtcgtgcgcgaagcagatagacttggaacgaccaactctttatgcttcgtctgaggcctctctgtgtgtacgagaaaagaagaggagtatttttggaacatggaaacagaagagaacagaaggtagggctgaaggaaaacatttcttacattcgtgggcgtatatgtgccggatgaacaacagccatccacttgttcccggggacatagaaagtgtattgatggcggtgctgctgggctggggtcaagtggctgctgggacccttcgtacacgcatatttttgtattcgggaccatgtgtgtatatgtaaataaccaagtaggtactctggtacatggcggtgagtgatttgtccggatagcaaaaggcggctctctctgtgaatgacgcaccagcggccagggataaggggacatctcaagatgaagcaagatgccaccaaacttcccatcctttaatctggatagtgcaatacaaacaggctaggctcctcgtatatttgagggcggcaggttctgggtactcttctggcactaatggagcgaagccaggcaattgtggcctctgtggtgtccagccagacagaggagagatgggattctggagtcagacctgttcatgagggtgtgaagttgtcctgatcatcaccatatgaccaaatcgagcgtgctttgcggcgaatgttgtgacaccaagcacctgtctgtcccaaagcctctcgttgcctatgctccctggcgaaggtgacattgatccgatctgggtcccctgacagaccgacctggtggatggctggtccctgaattacaggccctgtgagcggaggatgccgttcaccctctggtgcaagggcgacggcgtggcgtcggctctgaaacaaggagccagctttctcgctctggcagtcacatctccggaaatgcctccgtccagtagccgtcatgcaacgagatgccagccaggagctggcagtcacagggctaggcagggctgcaggacttgaaaggtgcccaatgacgcaagatagtaagacctcgactctcactttccggcttgtggagagtgggcgaatagaaaccagaagcaatagttcaaggccagtagtccagcagagtcagacacagcacctcgatgcggcgtggtctgatgcagagcagaatattgtagctcaaccgtcgttccttgacccatcatcatctgagttgctcaccagcacccaataatctaacccaaccccgcacgtcccgcacacaggatacgtgcagccacaaagcagcgggtagtagccaatggagtggtcaaagatggagtcgagttcgattccagcttgccagagcccccagggctgacctggtagtgccgaccggctgaaggcttgggtatttaggaaacgcggggtcagcgtttgagagtgctgccagcccatctaggtaggtaagatgggcttgcgagagcggactattgctctcacatccaaacgattcactggtgatagctcaagatctggccaggcagtgcccgccagcacgtcggatggtgtcaatcctttggtccggacggcggcctccgcacctgactagagcagaccgaggtcggtctcgatcgtcgtgatggttatctgatgtagtccatgggttcatgggtttatgcctgtcgaaatagagttggagaattgtgacgtagcctgagcttgatgtccctaagcctggtgagcttggctgacttagggccaaccatcctatgtacagggggtcaaagtgctgccagcctactggttagcctatcggtcctgggcattcttgggcaggggttcgggtctagactggtctctctggtctctggccaagttctgtcgtaaaaggcttccccgcggagccatggcctaccagggcggctccccttgacaggcaccactgacacttgagagagtacatagggaagatgacccggtatccatgtgcaagccatttgaaattccgtttggccattgaaaagcagtgctagaattggtatcacaacaacagaaaatgctcctccctgcgcagtcagttctgaacgccagcctgttacccagcgtcttgctgtgacagtatctcccaatatctcccaatatctcccaatgtctctcattgtcccccaaaatacccagaagaattagcattctatgacatatcggatatcattcatcatcatcattatcatcattcatggctgcgaaagccgttggtcttgcaatgaccacccctcacgtcttccctcaactccccgtcctctctatgttgggaccgttatctggccacatagtttggtttcctggccaggttcacagccggcggtgcatcttcatccaggggataaggcagcgcaggagcagctcctcgcccagaggttgaatgttgcctctcgggaagcggtgttttgggaggtaaggggggaggtccatcacgttctggtaatggctgctgctgtgatggaagctcttggtaccgtcgagggtagtcatccgcgctcacaatagcaatcttgtctgagcctgacgccgttcggtactgcgagggcgtcggagcattcaccgtcagccggtctgcgtcgtcattgttctgaggcttagccgggcgaccaccttggggaggcggcggaggggctagagtaggggcgctcgagtacggctgcgtgatgcccagcggcgaaggcgggaaccgctcgcctgaacttctgggggacggcgtgctgacaccgggccttggaagcatgtcgcttccagactcgtacgactgtcgactgggtggtgtgcgaggagggaagacaggaatatcgcctggcaactcaacagccagaggcatcgagatttccggcaacttcttttcttgctctgcggcactcatggatccgagacgctcccaccgcaacttggcgaagtgaatcttggccagcttcgatgacgctccctgtaccatcttctgctcctcctccctcgccaaatagcgccgggtattggtactgatttcggccagccggttccactcattcatgccaaactctcccacgcccacctccacattgagccggtaataatgctcaatgttgacaccccgcttgggcaggtgttcctttttcatgagctcatgaatcttctcacagccctcaatcttggctatcaacctcctcctggcctcggcaaactcccccatgaagccctcgtaccacaaggtcgagtttgtatcactgctctttggccgctttcccgttccgacgctgacaaatacgccgacctcacggccgggccactcattcaccactgcctcgtccagagcagtgatggaagggttgaaggtaccagcgccatcgtcgtggaaaaccgagtgaccgatctgaatcggcttgaaagccaaaccgatggcgcaggttgctctcccagcttgccaaatcttgcagtcaaactcgggagcgggctcctttctggaatcgtaggatcgcaaaagcgccggagcgccgcctcgttgggtacctcgatatacagctgtaatggcactgcaaagatgatatcaggggtcagtcagccgtgtcctggtggaaacgagggaatacagaaattacttacgtcttggtcctgttctccctctcgtcatacaagcgggcgttgggattgccccagcgtgaggagatggtgggccttgctgcctgcgatgttgggctcttggcgctgaagctgatcacactcgcgttgctcgaatgccttctcggataggcagcgctcgatcgcgaggcagtggacatgggatacgtgctgctcgtttcagacaggtcgttgccctctcgttcatacaccgtatgctccctgacacactccttgattgcctcctccagcttggtcgccttgaacagcgtggacctatagggaatcccagcgatggtcttgtccgtctcaaacaccatgcgcgtcaggcgcacatacagttccttgcatgtctcgatatccagacgcagcctgccaagcatcaaggcgatgaggccaccggtgccagtgccaacaatgaggtcaaaatgatcgcatggcttaggtatctcggatcgtttgggggcccgaccttcgatttcgacgaacgtccggtgcatcagctcctgcaggatcaggaacatggaatagccgcgaacacctccaccatctagaggcctcaaaagacggcgttagtatgctatgcttgcaacctttgcgctgcgcgcacgcaggctaagaaagggccggccgtcaacatacctagtgataagatgcgcaggggcggacctttggtggtgtccttgcgcctcaggtgggagtccatctccagaatgtaggcagtcactcagaaactgcagactagagaatgtgtgagtatcgggaagcctgcaaggccccgaggactcgacgagtcctgaagatgatggctttgccgccgagaggcctacagtggtttgcttggcgcaacgactgggagagggggtgggtgacgcaggagcttgggccggacggggaagcgatcagcctggaaatacgccacacctggcttgaggttgactgaacgttttcttttgggctgctggggagcaggaggatatcgtgtagaaaaagatgacctgaatctgtatgcgatcactccgatctcagcgcttgcagataatccgagagcaacaatcacgggcggttgtggcagtgcctgagcgccgagtcccgagaaaggaagccttctaccaagtacatggtgcacacaattcctgaatgaggcccgtgcgttgggggctttgggtgcccgatgacgaggcatctacctatcacctcctgacaatcagggcgctttaggacggctcttgttgggcccgcgcaatccggccacagggaacccgctgctccgaatgcacaaggctgtcatcacctgctctgattcgatgccacgcgagcttcggtgcgagggcgaacaaacacatggctgcgaggtgtggctgtgccaaagcatgtcttgaagacgagggatgaggtgggaagggaatgaggcctttcctaatgtcaaaaagagtctcgcacctcggtcattaaacccgagccatctgaaaaggcccttgttgaaagacgggattccggtgtctcttattggtcgtacctaccatgggcttgttgggtggtaggtaggcagttgctagcacaacaagggcaactagctgtctacgacgtcatcgtttcgttgcccgctatctgtgtcactcctaatagaggaccagatccatcgtgaacatgttcaacacaaccttcacttctgcatctcccgggcatccccgactgcttgattcaactctgcccagtcagccgtcatgctttcgtcttgctttggatctggccggcgccggtcagacgagcatgagccgctgctgccccaatacgatgacaccacctcgctgcagagacagctgcaccagaagctgcacacgtaccagatgcttcgagctctgtccaaaggtttcatgccctcaaacgagcagaccattgtgaatctcagaacccttctcgctgccgacatcctcaacccagagctcgacacaacggagctgagcgactcgggccaagcgctggtgcattacagcaaacagtttgtccaccaactcattgagctcctccaacacaagaacagcaatgatcagattcaagattttatctggtacttgaccagggcgagggtctcggtggacatggagcacgtcgctgaacgggcagccaaggcaaaggccaaggctgacacagcagcaggtttgttggagaatctggtcgatttccacaccagtgcttgctcggccaactgacacatttattcttgcattctagcttacaagagccttcaaaccgtgggttccctgcttctcacaaactcggactttcgcctgttcctcacagatctcaacttggttgcccgcgaggtgttcaaagacaccgcccttgccctttccgaggcttcgaaagaagcgggtaaaagtcttgaactgtctcctcaggagcaggaatccttgaaggcaccggggaaggatgcgcagacaccgccaagcaaagaagacctctcgaaccaggcctcagagattacccaggtgctcaccgggagcacgtctaccgtggttgagggagccgaaaacagtatcatcagcaagctccaaggtaatgaaaaagacaccatgcttttccggctgaaacaggccgtgttaaagcttagaaaacgacgcgactattccgactctgtttcgaccctctcactactgctcaagcgctatgccatggtttactcacgcattgctcgcgacactctcgaggcggctgaccaagacgttgaccggaatccggagacggaccgagcgctgaaaaacttctggctgttcatccgatcattcggggatgccgaggagtgggaagagctggagcggcgcttcagggacgttatggatcatggtcaaaatgacccggaatttgaagacctgattcagcaactaggaaacgcactccaggaaatgtttacagacgcagccttcttcgagcacgccgaggagaggttccaggcattacgggtcaggtcgagacaacttgcctcggggtcatctttacgggacgacatcgacggacttcttgctcaggtgcagtcaacctttcagtcggtcatcaaagacaaggatgttgccaatctcatcaaaaccgcaaccaccatcggcaagattctttcccccaagcaccaatatgccaatacagatttgctgacggattcgatcaatgtttttttgccactgctcatccagtcaatcagttacatcccgatactcaggcttgaaatctcaacaccgcaactcgacttgttgcttgagaatctcatcctggaacccggcgtcacggtcaatcattcttcatttttcccatataagctccgagttgagaccttcaatgacttggagatccgcaaggcgcgctttcggacaacttcggcgataaagagcctgatgcgcatcaggattgatggattgtccatcaaggccgaagaggtagggttctggctccgggcgcacacagggctcttacgcctggtggatgagggaattgcttcgtttgagcttaacgagcgaggtctggacatccaactcgacgtggaggttgggagagacagacttgagaagatactctctctaaggggggtaagggtgcgcatccacaaactcaactggaccctgcggagaagtaggttcagttttctggcatggctcatgaagccactcctcaaaccccttattcgcaaaaccatcgagatgcagatcgcctcggccatcaaggattcactgcactttgccaaccgggaactcttgttcgcacgggaaagactccgtgcgacacgtatagctgatcctgatgacttgcggacttttttcaaggctgttttggcaagacttacaccccctgacgacccagatctctacgctcgtgtcggtgtcggcgagccaggccaaggtgttttcgaaggagtttacgcgcctggtagcatcgtcaaattgtggaaggaagaggcacaacaggcaccgcaaaggatccgagaaaatgagagagacgggtggcgcaatgatgttttcgatgtccacgccagacttttgggatgaaggggtttattactcatggtctgcttgcgtcttggatcctcttcacttgtgtcacgataagggttgaggacacaccttcaatgagtagtcaacttgatgcaaaatattaataacactctcagtaaaatgcgcttgtacaccatgttcttgcacgtgcgttttactcgacatctgatccgggatgtaaagcctgtcttgggccatgacatcataactgggggttcactgggcgcatatggctggacgccattcgtggttcttggcagcagtcagctgaagccgagtggctcaatcaagaaaccaatatcgaacaggcctgttctcagtggctggactggccaagctgcacgctttgaagtgaaaacagggtcctgttcgtttcaacggtggtggtggtccggcctacccaaacaagtgacgtggttcaaggagctgggcgcttctggtttgaagtcatcgtcaacagctaggccttaatcgcgtcaaaaaacatggtcagaagggggggcgggaatgacgaagaacaaaaagactaccaaaagagccaagtactgtccggtgccacgacataacgtgtagcagtatatagcccaacggtgagccgtaggttcctcatcggtctgcctccattctctagtcctgtaatattcaacagcaacgacggcttaccctgcccatccgttgatagatatccccagcagcaaccgttacgcccactcgcgctactagcctagcccaactcaacatggcgctacccgagatcgcctccatcattctgcggctggcagagctggcgtttgcggccgttgtcgcaggcttgaacggcgactatctacactcagttcgcggcgcttcctcgtgggatttgggacgacacatctacactgaagttgttgcgggattgtccattttgtttgccattatttggctgtttcccttcagctcctcgtttatccattggcccgccgatctgttcttcagcatcctgtggtttgtagcctttggtctattggtggattggctcgatggttcttgcgggtatgtatcattgcttagacttgtttcgacctctccggggccaaaatggattaaagctaacttttcctcagacgggttttcgactggaccaacctctccttccgggacactgcatcctgtgcccagttcaaggccgtagtcgccttttccttcttgagtgccatctgctggctagccagtgccatcgtcgggtatgtttaccactcattgtttcccatacattttgttaaaggcaatcgactaacacgaggggccgtagtttctggtgggttcgccgcaacactcgtgttcgtcacaccaccactgcacccacctaccgtcgtcgccgttggtatcgctctcgcgtttaagcctaccattaccggtaccccagatgaccatgacaaatcacgataccccattcagagcagcaattttctcctaatccaagtaccctattcattttcctttatcttgtggtaccaaacgataatcctccttacaatgtggtgtaacgacatgacggtatgaagagcgacggggcagcgaggcgaaggacaaatcggaacttcttgatatattccatattattctcttctcatgtatttaaataaaagcaaaattttgtgtgatcaggagtgatctgtgcataccaagctcattagagttgactctatctgccgttcattgaacatcttctcaacaatgatcatcacaacaaaggcacccaggatcagcagggcatgaagtggctgagtgggggtggggtatctgtcacaaacgggatgaccctttcggcatttgggtcaatcaaacaacattatacagcacgcgagcacagagggctgtggctcggtcagcgtggctcctttacctggcaatcaatgacgtcttgcgttatgcggagcggcaagcccggcaccagacggtgtaagtggatgtccacctgctaaaaagagaacaatgcggggaagcttgaattgacggggctttgcgccacacctggaactgtgacgcctcctcgtgccccttacatgacgcggatcctgctttaatggcagtgatgccaaggttaaagcaagaataccgcagtggtaccgcgaagaagcagcggccgcgcgttgtagaagaatgtaccttcaaaagctgtttgctcacaagatcgaaatgtggcgtggatccacagagaatcaatgggtccaggccaagcaatggggaaatgctcggcagctccaacggcaccagccacacaacttcaaccacaaacgacgtcacagcatcccaggcgaattgcatctcctttgcccacgcggcccgaattccccatcttggtgatgggagccctggagagcggagcttcattgtttgatcgcatctggatatgcaactatgacgtatatgaggtaatgcccgtttgctgggccgccatctctgacgttctattggactcggcggctctgacagcttattccagctcgagacgaacaagaaggtacgcgtctcaggacatgcaaccggccgagaatgatgccatttgaccaacttcgcttcggcttcttccatcccttttcgagaagccttgatggaatgagctaacatctggcccaggcgaatggccatgcttgctatgacacaaccagagcgaatcttggttctgggtgatccacatctcgatgatgtttcccatgtgcccattgacgcctttcttgttccgtatctggtgtcaaagggatataaggactgttccccttcctgttgaaccagaaatttctttcctcatcatcaacacacaaagcgcattatcacaaagcaatcacaactcaaacaaagcttcaccactcacctcactatatcaacacacaactacacttgaactcaacactcgatacagtacccaacatgtcttccatcgtcaacaagatcaaggaggctgtccactccgacaagtcccaccatggcgctcctgaaggcaccagcggaccccacaactctcgtgtcgccaacgctgccgacccccgcgtcgactctgatcgtgacggctcccacactgctggccgcaccaccggcaccaccggtaccaacgaaggtctccacggcccccacaactcccgcgttgccaacactctcgacccccgtgtaaactcggaccgtgacggctctcgcactgctggcaacactggtactggcttcggcaacactggtactggcttcggcaacactggtactggcttcggcaactctggccgcaccgctggcaccaacgagggtctccatggcccccacagctcccgcgttgccaacactctcgatccccgcgtcgattctgaccgtgacggttccaacactcttggctcttctggtaccggcacccacaccaccgctggcttcggaggcaacactggcatcggctctggcaacactcaccgcgccaccgccggcaccggcacgactggcatgaccggcacccatggtgcccccgccggcactcacggccctcataactctcgcattgccaacgctgctgatcccagaattgactctgaccgtgatggccgtggtgccatccacagcggacctggccctaccagcaacactgccggccctcactctagcgatatggcgaacaagctcgacccccgagtcgactcggatcttgacggttccaagaccattggtcaaaacaggacttaccagtaagtaagtaaaatacgagacagcaacaacttgcagacagcggtactaacctcgtcttctctcagatctgggacagccacttccatcgcaagagaccctacggacgcttctcaggtccctccctctgtccttcgcaagcatctgggtgacccggtggttgagcatgatgaccaccaccatcaccgcgagaggagaaacagcgtgaagtcccaccaggaggcctttagcggagtctaaatagggggttgcttttcgaccaagatggaacatgcattatgagttatgacggatggttttgagcttttttctttgttgtaataataccaagtttgctcttgttctttcattactgctatcactcgcttgctctggttagaaagtggatgatgtggtatgcaatatcaggtagctagatacccctttggtgtaggttcaatgcaaacaaagtcgctgcaaatgatcaaaactgcctacatagaagtgaacatgatatggtcagctcattggacaagtcttcaacttcctcaactctccctcccgagctacatatccgaccaacagaaatctagcgacaagtgtctgaaaaatttggactgttgcaaagatcaagctaccgtcccccgttttcggttttctaagtgaagctctggtcgtctttgagccaaaaaaaaaataggtctcttggaatgatgtgtgaagtcaggaaaagtggggcaggttgctcaaccacggacttggaaactttgacaacactcaataattatcgttcaagccgacaacaatccaagattctcaccctcatcgacacacactacttccaccgccagctgcaatgaggatagcgccatatttactaattgaaaatgtcgagtcagatcgactcatcagatgaacaattttccgcctctgagcaggcacattcgagctcaccatctccttcgcaattttcccgagcgtcgtcctatcgaggccgcgagtataccctttatgacgcggtcgccggtatctacactccactcctcgtttcgtactcgctcaagcatcctaactcggctactaggtcaggtatctctaaatgaacgcgtccagccacatggcggcagcagccgtcgcagcaatcgacctggctcaggaaacctcacctcccgcacctacaggcttgccccagaagaggttctatttcggcggcacaacgccccgactcgatatgccgagcatgatatctactgggcccacgaggatttgctgccgtcacagcaactacccgacagtgccctgctgagatctgttcactgttacgcaagtaaattctacgactacactgccttggattcttcccacctccactcccagctccccaaggatggatcaccttctcttccaagccagacacaaccacactcggagtttttccaaaagaaagcaaacacagacctccggagcctagatgagacggccctcctggcttttggcgtcctccttgaagaagccagccgtgaagtgctagggaagcggggcgacttggtgtttaccgaggcagagggatatcagcctccccaagccccttctcaagcagctggagcaacgccagcaaccacggccgccaccctggtgccatcatcaacagggggaaccgaagagggaaaggcaaatggcggtggggccctggatactgatgtctcacacggtgaaggaggcccaaaaaaacgaaggaaagtggcgagaagacgcaaaaaacgccctgacgatggtcctgacagactggactgacgacagttcattggaagaaaagaaacccggattctcgacccagaaagttgctcggctcgaaggacaggtttggaatctgtttcagttggaaacccaattctccagtccggattgatggcagccatgagaagaagcaacggaaaaaaacaacgcagctgtttgagaacctgtcgttcttctttcgccacctcgtgggtgcgccagactcgagagctaagccgacggaccggcgtgggaagagagaacccaccagactggttgcgcttcccgttggctaccgaaaggacgccattcgcattcgggtactcgtctctgtctgttaccaataaattgttccgctactgccgggcgttgttgcttctggaaggatcacgccttccattcgactgacatctcccagaggattggctagccagtttatcgtctgcaattccgtgcaggggcaaaagaaacaagaggagcgacgccatcagccacggcatgtctttgcagcaggtagtttctgtctctaatgcggtttcctgacagtccggtctgggtctctctttgcctggaaccgagaaggtcgaaatgccactttgtttgtcagaaaatgtcatgatgcatcatatcatatgtgagcgagctagtccacccacatacacatggagcgaagcttttgagtcttttttttctttcaagccgtgcatatcacacagtcagcctgcccgcctgtccgagcccagtgggaacaggaaaagaaaacatgatggacccgattcggttcttgggcccgccatcctggtgttggaaagttccgacctcttggtagtcgccggctgggaccgacagcctccatgacgattggtcagcgggctgaaccagcagacaacagtttgtggattaaaaccgatggccaggcaagacatgcagtcgacaacaggatgatggtgtggtggcgctccgtcccctcccccctcccccccccctcccggtcaccaagctattgggacgtgctgatttgcccatcaaggtatcagaccatgcggttggtgcgcctggggggaataagcgtggggttgggagaaggacgttgcgctttgctcgctttccccaatgactgggcacgtgggagaaggccgctcaaaagacctgcaaagatggagaaagatgcggaaggatcagcattacacagattgagagcagcagaggggtttctgatatcgggattccaagtgagagttagtgctccgtacggcacaggtacaggacaggataccgtggcccccccccgccattacacaccacgacaggccatgggttaaatagcagatcgcggagttgtctccgaccacggctcaggctgctatgattggcttatttggcctttcgccagacgatacaagagtgtctgtcgtctgggcttctcactgtcggtgtcttgcggctgaggtgatttgctttctcgatgttgtctcaaccagttgtgtggggggaggggaagcaggtgcataaaaccacatgcgctgtgtagcgcggtcaggcaaggcttttgcttctctttggccagaatggcaggtgagagggtcgtcagagttgcattgggttgttggttttatcgataggcaccagataccaagcacatagccgaaacaagctggctggctggcaggaaaggagtgtttgcaaacgtcgaccctccagcgagaattgcgggggaaccaacaacctggaagtctcatcagggtcggaaatggcgttcaagttctgcaatccacaacctcacaccacggcgagggcgaacagggacagacctggatggacagacggcctgtcaaagaaaatggccggtctgcggcgagccgaggatttctggtggaaaatctggaaggccgccgaacctgtcagggaacccggcaacttgtgcgaccctggtcttcagatgctgcaccgtgcgtctgtccaaatctcgctcccacttggctgggaatcatcgcgatggtacgaagtttgtcaaccccccaatccccgataatccccaaggttatcgcttacaacagtgcaacattatggggcgatatcagtatcaaactgcttggatgttcatgcttggcctgctgagaatgtctccatgtgtgcgacagcagccacaacgacgacgacgacggcacattgtagcatgtaagctaggtatgtaccacaggttggggcgtcaaggtccgtgtgtctcaaatggtcccgactttgtggacgcgtcgccccaagaaaaaaagatagattcccagtctagcccgcagtggcatggtctcgcaacctcggtcgggtcgttggtactggaaaggactttggaagagagtgcgccgtcgactgtcgcggcacggtgcggaagcaaacccctgtcaaggtgacagccagccatccaaccagctctccagtgggacagacaaggcgggcgggaggcgtggtggggtgactggtgtggtgtggtgtgctggtgagggtgagggcacggtgagatgaccgatggcgcatctcttttggttcgtcttggagaactcggggtttgcatttttctgcatctcgatgctgatgctgatgctgatgctggtggtggtcttttggggggcccgggagttgtgctgccccatcatctccatcctagcgttgcacatattgtcgagccaagttcttcttggcgtcgtctttttttacattactctcagctctcctcccctccaccaccgtttccataccaatcctatgatccataccgcccgccgcgctaatccatcctcctgggcccgtccaagctgattccacaactatctgaaaaggacgaggacgggggcaagttcaagggcgacgcgttggagaggggccgactgcccgtaggggaggaggggtgggattacctcgttgctggcttctgctgaccaccacattctgtgtcaccgtcggactaataccactatcactcactaccactaccgctactacgctgccaccgtctatccttctttctccgttcgccctcatcctgctcgtacctcattcctgctgacctcttcggcctggcttcggcagctgtcaccgcctatccggctctatttgtctgctccggcagcagcgagctcgaccagcagcgcgcaaaggggggaatgcggccaaaagaaaccgatgccccactaattctcgtgaagctgtcacgtaccaagccgcctattcgtcgagggggcccaggctggcagagcacgagaggggacaccccggactggattgaggcgctcttgacccacccgtttgcccgcctttgattgtcccatcgaaccctggcctctacctagcttccaccaccccggttcggcttgatgagacgtgctccgcagggttggtgaccgtacctcaattttgtcggattctctttctctcccaaggcccaaaacaccgccggacccagctccagctcgctcccctttgccattgaccgtctttttggagcccgtctccagctgctgcccatcagcaccacccacaccccctccgcaccgccgtttttgtgtgtaataaacacgtctcggggaccccagccagccagccagccagccagacctgtcaccagcagcacagcacaagcaccacagcgagagacgagtcaaggaggctttgccccgacctcgcgctgccggcctgccgaaagccgcatccttgaaccgagcttctgtctcttttcgagcctccccactcacccgcccactccaagaaccgcgaccacgcaaccagttctctgttgttgctgcccaactggttggtccggttctgctccctttctatcgaaacccggtcccaagtgaggcggaaaggctaaatccaggggagccttttgttcttctgccgagacctcccctccacaagcaaaccacagctttatgccaatctaggccaggccaataagcaagctcctcccggcgagcccgttcacgagcttgcgcgaccaccaccactgccaccgctgctgctgcttctcttcctgctgctgccactgctcgtgtgcctgctagctgtttctctccttgctgctgagctgctgcctcgtctcctgctgtacaccacacagacagcgagaacgagacaggaagaaggggagaaaaaagagagggacctgggttcgcgcaagtcacgggttgctcgtggacgatcttgcacttccacttcccacccccaagacgggctcctccccgcttgtgttccatgcaggtgttgccaggcactgtctgtccatgggctattgcttttctgccgcttgttgcctgacctcgcgtctggccgccgccttctagtgtcaacggcattcatgtacatacatatataagacccccccagccatggaccactcaggggcgcctgacaccaagcgaccccgtctgacgactggctcgccatggtcagcaggcggttcacatcacggcagaacactccttaatcccaatccctccccaacgagtggacaatcgcctcatctgccgccaacgtcgagcccctatcatcaaccatcaccacatcactacgcccgcccttctggtaccggcgatcacaaccatccacacccgcaccctcaccctcatcctcaccctcaccctcactctcacccccatcctcaaccaccaccaccgccgccgccgccgccgccaccaccatcacaagcacctcaccctcacgcccaccagcagcaccctcatcctcagggtccgccgccgcctgttgcgcaaacgcccgtcgacgaccgaagacaccatgagtccgagagatttcagaccatgcacgatcaccggcaacctccacactcgccggcccacccagcattttcgagctacccttctagggaaaccatagtaaaacccgacccaggcgaagacaccacgctgccgcagttgcgcaggcctctatcaacgagcaacggtcccgaaatcatgacgccgggaacaccacatagcgccctcccgccgcagtcatacgccgacgacaagcgccatatgagcttcgacagcggccctcagcagcagcagcagcaacaaccacagcaacagcaacagcagcaatcacaaccaccacagcagccgcagccaccgccgcccccgccgccacaacagcagcccatgtacggcaggcaaccaagctatccaccgcagacgcccttgccacacgcgcagccatatgaatacccaccaccttcatacggagcacaacatgatggcttgtcttactcgatccatgtggcctcttcgaatgcgaagcgcaaaggacagcgtgcctcacaggttagccgatctgaaccatgaccatgccatatctgtagccaaggaagggagaatgactaaccatgtatgtatgtgtgtaggcctgtgagacgtgccgtcagctcaaagcaaagtgcgacgagctgaagccttgcaaaagctgtagagaaaagaaggtggaatgcaaataccgagaacttgttcccaaacagtgggttttgtatctggttaacgactgctgtctcagtgactgaccatggtgatacaggcaagataaagtgcaggccgacattttggagcagcttatgattatgagaaacgactttcaggactggatcgcgacaaatgacaggcgcgtgggcaggctcgaagaggcggtaaagcgaatcgcaccagcagcagatcttcagcagttcgagccgatacaagaggaagaaatccgaccagcctcagctgaatcagggagcgcgcccgtggcagaggaagcgtacacatcatcacccaccggaggggctcaggcaccccccatcgatgccgaagctgcacgccagataacacgtgagatggaggttgaaaaggaggtagaaccggggccgttcgttcagcctggagtcccgaccatcccgcccaatcatacgacattggctgccttcttgctcaagtggcgacccatcgaggcgttggttcgacgctatctggatgccgagaagatcaagtatgtggacgagttccccatcagacaggaggaaagacgagggttgttgcgagtctggggtcggggcgaaggcatggacagcagccgggacagggacgcgcctcacgatctggggatgatggaggtgcatgatgactactctgacgccggcgcgccatctccggcagactgctggggcggaatcagcggctcacctggccccatggacggaaagtctggcaacggactcctccatatcccagacttttccgaatcaactgtgtggaaatacgtcaagagcttcaacgacaatattcagaacatgcacccactcattatccccaatgagctgaatgccatggtcaagctgtttctcgacggcctccacccaagctcgagaagcaagggcgggggctcgaacattgccaagttcgccgttgggtcgcaaggggagacctcgctcaagaggaaaaggacctcgcccggcccggaaggtggcagtagcgagccctcgttgccgcccaaggtcggcaggcccatgttccagcgatctattaacaatgcgctggttctgctggtccttgcccttggtaaaatctgccttcacaaggacaaacggctgccagatgttgtgccagtcagcgagcctgtccagcacggctccccctttctgcgcaacggcaacccagcgccagcatccccgtcgcagggctcccctccgtcctacgcttctcattcccacgcagctggcctcccttcgcccaaggacagtggcgagcgagctggaaccagcaggcgctcctcgtttcaaggatccggcgtgtcggccaaaccggtggcctccctcaagaggaacctggacgtgattcctggcctggactattttgcccatgctaccgacattcttggcggtcaactggctggaacaagcctgcgtcatattcacgcgtatattttggctgggttgtaccacggtcagctggggagggtggtggagagctacgcctacatcaaggaagccggttgggcgctgcagatcaaaatgagaccgagcctggatcggttcaagaggcttcaagagagccagacaaccaacagggactcggtcaccgagaaatcggacaaccagcttgtctttgccttctggacatgccttcagctcgaaagcgacatcattgccgagttgccgctgccacagtctcacattttggcgtttgaggaaatcatgccttatcccaacatcaacatggcgacggggctcggttttgacgagcacgtcctgcgaagctacttggctcagctctacctccgcaagaacctgaaccagatccatcagacgctgtacaacccggagaacccgcagcctctcgagactcactcagccgggggcggcatcattgagattatccagaactcgctggacatgcgattcgtgccacccgagttcaagtttttggagtctgatcccccagcaaaggatatcctgtctgcccggttgcgtgccaagtactggggcgctcgggtcatcacctttcgcccgttcatcagacagattctcgagcacaatttcgacaaggccatgtccaccacgcccccgatgcagggagtgtcgccgaccggcaggatccaggatgatttctctgatgatgtcaaggcgtatgcccagaaaggcatcaaggctctggttgaaagcacgagggcctttcacggggtcgaggacaagcgattcatcatcaccaatgtattcggcacagcgcatgcgtaagacaaccacccacatgtgttcttgtttctcgagtgaatatttgctgacctgatggctgtagacaatggggcaatctgctcacgctggcggccgtgttcaaggacccggtgctgaaccagtacattgacgagggcctcttgaaagaactttttaccaaaacaatctcctttttcaagattatctcgcacccctcgagcgctctatcaatcgacatgcggattctggaaggccttcagaacgaactgtggcgacggccaaacagtatcgacctggtggaccaccagcccggatccagcttctcgagcaacgccagcaacggcatcccactatcttgcatggcgccgaccacgcctcttcctggcatgcatgctcccagcacaccagtggacgccttccacccaccgccacccggtcagctgcacggcccgctcctaccgcccgtgttgggtgccgtacccgacggcctaccggtgatgtcaccggggtccctgccccccatgcagcatccaccaccaccatactgacattcgaaacgatccccgacctttcgataaggacacttgacgctgcttccgctaaacaaacaccatacataccctgacctctcatgcatctcatatacatacacacaatcacacacacacacacacatatatatatatatatatacatctacagacacctaatcgtcttgttcacgaccctgatagacagggaaaagatggggaaagaacgaagaaaagatacctcggaaagttgtgttgcgggaaacaaagccaatcgtggtcttttcttctttgcggtctttaggggagagagggggagcaaaagagagagcatggtgtcatttaaagcatctgcatcatcatatgtgtgcgcgctctggacaggtctttctttctcacggtcgcaagggataaggggggaaggaagagaagggggggagatacccactttgtgttgaatcgagattttagccaagtcttgttgtttttcgcgcgcgcagacagaactatggtaatattcatttttgtcttccaggaggtgggggggttggcttggctttttgtccaattggaaatggtttctgggtcatgtcttgttttttcttttgcccccggggtgtagcacataacatgcccttactcctcttctgtgtctctacttttttctatggaggatggttggtaggctggtgatgatggtggtgggcaagggcggtggtatttttttcaaattttttttcatcttcatgttttctgttacctatctttacccaagtcatcccgctcctgtgtttacttaacctaacctgctttggctacactatccattaacaacataactactacattgaactattataccatacaatatcacactaagttcagtccatgatgtttagcaaatgtgttcgaactattatcgtgcgaagtggttcgctatgaaactcaagagtctgtgataagtatgattacatcccaagcgctctctggtctataacaaaacaacaatcaagcacacccacccgtccggatacgccgcctctctcatcaactcttccaacggagccctgaacggcaccgaacctccgtgcatgatgacattcgccaacaccgggtctcgactagacgggaagagtgacgggaggttttccttcaggacttctcccaatgtttgtggtttcccttcccaatgacaccacatcagcagtcatgtcaagaacagcactaggcaaggaaaacaaactcacgattggcatttcgaggtggtatcagtgtttgaaccaccttgaaggacccatgatcgcccccagaagtctgcaagggggacgacggaatataaatccgtaccggcacgttcttcaacggcgtgggcgtgttcagcaaacggctgttgattctgctaaacgaagcatagtcatcttttttcgtgtttgatcctctcacgttagcgccctcatcatgttgggtaagaggaggtaagggaacaggaaagaaagaaaaaaaatacgaactatcctgcacactgttccacaaggcggtgctgtcgtccttgctcaaccccataatctgcttggcgtttccgttgcggacaaaatccgcctcctttgccgagttggtgaaggtgtcggctatgtcccattcgggtccgtcaccgaccgtcagcctccatggtagcgaccccgcagaatcgggggggaggtataaatcgacgaggagcccaacagctaggttgcggagctggacgtcctcgtagtgaaaagacgagcaggggagcgggctgaagtaggcggataaccgggggagcagaagggcaaggtagctgaagcgggggaccgagaccacaaaaggattggtcgagggttgggaggtgtgagttatgtaaaggggtatttgaagggaccagagggcctgggggaggggcggtggtgggatgtcgacatcgtcgtggtgtggggcgttggcaccgcgacggccaggacggtgactgagtgaagaaggggagacaggggacgatggtggaggagacgaaggcatggtccaatgcaatgcggtccgagattgtggggctgggccggggctgatcacggcggcggacggaccaagaaccgggccagctcggtgctgtcgtggttggcggtggcgggtgccaagaagggacgaaaacgactgccgttgctgccgctccggctttgttgtggatgccctggtacaatgatatgtgttgcaactgggtggcctgtcgatcgatagtcggcgatgctgctgctgctgctgcggggtaggtagcaaggccaggcaatatggggtgaggggtaggatggaagcaccgcgtgagtctgatgcaatgcgagctgggtgtcccgtttcgaaacaacgggacgagattgttggagaaaggctctggcggtggtggttggctggtgggtgggagaaggcacatgcatgcactttcacacgctgcaaggccctgcgtgggagacacggtgccgcttgcaccgtgtgctgccgtacctgcaaagtatacactaccctgcaccactcggcactttcggttccagcagcgctgctctgaggatagcaagtgctcggaatcctcgggatggcactatcggtgatggatggctcttgtcagccggcacagatagaccaacggctaccagccttacatacatgcacatgtccgtccgcctgtccaatgttgttgcgtattccatcaaaagtgttatctccacgtgttctgtggcttgatcgagatttgtctaccgcgagaacaaagtgaggggcatccggcattcatccatccatcacgggccgaagttcccccctccctcagatgaccgagactggatgggtggttgggcagacggttggttggctgtatcgagttccgttggtgagagtgagacggacgctcactcttactcctgctcatgcttcatgctgtgtaactgaccattctaccactcaacgaatactgcctgccacatgtgtagcctattcccgtcctccgtccccgtctggcaaaggctattccccgatcgatcaattcaggcgtcttttcggcttacttgtggtgttgttgtccaagtgaatatatagagtaccccccgatgtaacccacccagggcgaaaagaggatcgaggtttatggtctccatgccgacggttttttattttatttttttctttaaaaaatttttaaaactactagaagctaggagagagtgtttgtggcagcagcattgtcttgggaaggcatgcaactagcgatgtgtgaaagttgtgtctgatgtcttgatacttgtgaagattcatcttcaaagatgatgatgatcagaatcagtgcacagattaggacccagacgttgtggttcatgattgtattgctgcacgctccaacccctccaaccacacctagcaggtgtggtttcatatgtttttaaatccatccaaaccaagattgaactttccatccacgtgatgtaactgtttccgctaaatgtctgtctgtaaatgtgtgtacaagaaaataccaacaatgtatccaagacaaaaccaagagagcatgtgtacacggatacgccaacgagcaacaagaagaaaattagaaaacagatgagaaaaaaataaatcaagaaatgctcggctttttcctccttccaaagacctttgaaatactgttcgattcccgccggcgatgttcaggggacatgggctctgggaatggggctgccattgtcatgcctggcggaggacccgagtgcttgagaaagtcggccaggtcagaagtacctcgggaaggcaccgaaacagcgtcgcgtggctcaaatttcttcatcgggacccgtccgctgcctcccaccggcggccggttggccatactggggggtggaccaccgcccatcatggctgctgccttcgagcccatgttgggcgccacttgaaggggggtatagcttcttccacccattgtcccgcccacaccggcgctagcccggctgcttagacttctggactcagctgcaggaagctgagcaaccttgggcccacccatgaagccagaacctggtccgccaccctgtccgctgtcacgcctcgtcaacctagccatcaggctcgccgagctcgacttcttcttgggcttgtttcgcgcagctgccgctgcttgggtctcttgggtggcaaaaggcaagacagttggctcgggcggtggggcatagttgttcagaaagtcaatcagactctcctctttggccgctggtcgtttgggtttgggcgttagctcctcctcgagcatcatctcgtcctcgtcgctgaggtcaatggcatatgggtcgcgaacgcgccgagtcttgcgcttgggtatcggcatgtcgaagtccatctcgttgggcgtaggggcagggtgcgaggtggggagaggcttgtttcttccggctaggagggcgctctgcgagttaatagacgactgaatagaagggggaaccgagctggtcgagtcgttgcccctcatctcggcctcgttgaggtgggcgtcgacggcccgaccgccaacggctcccgacatctgatccgagtccatggtggttcggaaaggggcaacggccttggggatccgcgggttgaggctcgggggaccgcggcggatgaaatcgatcaggtcagagttgtcatccttgtagtccacggcggcatcacgtgcctgaagccttggtctgttggggttgctcgtcatggatcccttgctggaggccacgctagccattgacaccattcccggatttcgcgagccaccgggcccagcgagcacattgacaggagccgcgccgccgccggggggtccggtggagcggatgaactccgcaaattctgccatcgactctcgaggcaatctcgcgtcccgggcttggggtatgtttccacgtggcttggacgggcccggtggagtcgaccgcggcaccacgcctccatgcttgctgctgcttgtgggatagctcctcagactgtggtgggtgtcgctcgactggtgagcatgtcccaccgaacgtgggttgttggacccagaggcacccatttcgccaggcctggccgccgacgacgagcgggaccgcggcgtgttttggcgcgcgtcctcactcttcctggtcttgaccgaaatgacgggactcccagaacccttttgccgtgttgatgactgggactgtggccggtggatacgcatgtcagctcacatctgtctgataacgcacggcaggcgggatgaggggacttacgttgttgtctcgcatgttttcaggagtcagtgtgtactggatagtctggtcgctctggatgagttcctcaaagttccgcaccacatcaatacgtgcctgcattccctcttccgaggttcgcacaggcttgatcttggttgacccgggtgagcctgagccgcgttgctgcttggaagacgccccgggggcttcaagaccactatcgttgcgagacctctccaccgacacctggccaatggtggccggttggcgttgggctgatgtgtttgccacggcctgtcttccggcacttcgctcggggacagcgggcgctggtgtggtgcctgtcgacggccgagagtttgtgggcttggcccattggtgtttgtcttttgctgcttttccctcggccagcacaggcatcgattcgataaagaaggttgagctcgccgcagtcgatggtctcgatggagacgaagacgtagaaggcaatatggtaaccttggtgagcgccttctgcgaggacggtgttgtagcacgctcggcattgacagggacagcagatatggggttttgctgttcgtcagctgtgctctcgatttcgcgatgctctctcgatgtggcttccagaatcactggtaggctgttgttgttgccgctgccagggctgatgggggtgacaggggacacggcatagtcattctcagtctccgaggcaaggtcgttcgctgccaaccctgaacgatgggcatagttgacagagagtcgggaacgggagacgctgtccggagaacggcgcgggcgctcgtctggaataggaggagtatcagcgccgctcagacgggaggggctgggtccgcgagacgagtctgtggccaccagcgagttgcgtgcagacgtcaccaccgggctccgagggctggtgacttcgatcaaccttgccgagtgaatgctcggtgacctcaccggcaggtttgtgttgatcatggtcggttttccattttcagagaatgttggtgacggattccgtcctcccaggatcgagacgcgggaggacctaatgatacgaggctcctcgatcgagacctcctcctcctcctcctcatcaatccggtcctcttcgacggtttcgagctgagtgacaactgagggggcgacctggatctgaacagcagtctcttctgacggctggacttgttcctccaccgcagcatcagaggtgtctatcgactggttctcgtccaaaggcgcagcgggggcttcgatcggggagaggtaaggagtagtgattggagtcggcagcgagttcgagcgtttgcgacgtgcgacaattggtgtttgcggtcgagacgatgcgggggtgagcagtccggtagctagcggaagtataatcatgctcttgggccgggcgggctgctgctcgctttgtccaacagcggccttctcttcctcgtcttcttcgtaggtgggcgccagtccgggcacctcgatctcctccacatcatttggtcccattggcagcggaatcgccgccgctgtcagatattcgtcctccatgagctcttgggccccttcaacggtctcttgcgcaacattctcgacttcgccctcgacagcggcttctggctccaggaccgtggctggaaccatcagttccgccgtgctgctgggggaccgcaggtggcctgccccacgcatcgaatcacccgaaaaggatctggccagacgctccatggtgccagcggtcggagttcgaatcttcttcttccatgatctccacaatcggcccagcgtgcggtccagggcgacccgctccatgtcgagctcctccaccacgattttgtcggcaacccccgtcgggctccgcaggccctctttcagctccttgtcatatttgacgcgcatgcggtgataagcagcctgaccggccacaatgagggcctgttcccccataaattccagtatcgacgtcaggaagatggcgactgcaggagacacggcctcggacagccggtcgtcggttcccgtctcaagatggccctgctccgtgtagtagtcctcgtcctcctcctccatgtccccgagcgacgaatacaccatgcaccgcaggcgggtccgcttccacaccagttcaacgtcccaatcgcttgcggaaacaaggtcctgcccctgggcttcagcaggaagctcctcctcgcctccgagatactcgcgaagttcctcgtcggcctggtttatggcatccttggcgagctttggcttcagcacttcggacacggccggacgcaaagcagagagggcagtggagtgggacacgcagagaaagttaaagagcagctgatcgagaaagctgttgaccagctgcaaggcggcaggcgacacggctgcagtctcgcccgatggctcaatgccatgctgatcgtaccaggcttcagcatggctgtcgtgatcgttggtgacaatttgcgaagcagctgaggcggcgatgaaggccggttcaggtgacactgtcaaagggggcgacatcaagctgtgtgcgacggtcgacggccggtcgctggatatgctcagggccctcgatcgtgaagagggaattctttggggggaggccatgcccgaggaggaccggggagcggccgagtctatagaggaatacatgtcgacggttagtgggagtggcggcagcaacaataatggcggaatcggttgcagcttccaaactgcagggccgctgctgctgctgctgctgctgctgctgcttcctctttactgatgcaggaggatgctacagtgacaagagacaaaacggcacgaggcagtacaagatcagcgccgcgcatccgaggcgcctactgctttctccgccttcggtcacacaagaataatactgagggaatgcggtcggccggctgctagacgggcgctgtttaggattggacggcaacggtggttggagtaggccaaatcgacgcggctgacaggttcgacagtacggtctcgcaggtcctggcttggacggtgtaagacggctgacgggccatccggtctgttagctaggattcgttgagatctggtcggcgcgactgcgggaggcgtagctgaaacaacaacgacgctggaagccgtgacgggggaatgggaaggggatagggaaacaagaattggtcaagacgcagaggaagatgctccaaattaacaagcttcgctgtgtccaagtggcacactgtctgactaaagcctctatcgcaagcaacaggaatgcagacacgacacagcatgtacggcgcaggccagcgttacgacgtcgatcccctttccttgagcactttacacaccgccggacagtccaaccgcctcccgagaatcctgtgttcagcttctctggtgggcatgcagccgtcgatgcgaggagccgaagggagaggggaggtgaggagagtgatggagagcagccgacagaattggatataataggggatggaaacacacctggcggtcgagctccagcaattcacgcatccattggtgtagctcgctggacgattccggtctctggtctcacgacgagaattggctggagagcgtctcctataggtaacaataagaaagccacgcggtcgtttggcgcagcaggaagcaggtctcgggcccagcagcccacacctgttggctatttcgcgatctggttatgtaggccgctgcacgggtcggttccaggttggcgttgcggcacgctgcactgttgaagaagggggacgcaaccagatcagatcgatacaggtacgcgagatggtcctggaggtgagaaaaaacaacttgggaatacagacagcatgggggaggggggggggaacatgggtgattttggccattgggcgcacagtcgcaagagttgccatcacaaaccaggggtccatgattgacgcacccaagattccccaggaggggtttagcggcccaagaaggagggcgttcccgagatgacctccgctaagaaggcccctaaaacacacggtcttgtcaggtacgatgtacctctactcctcttggtccatcctgatatggcatgatatacagatagcttctacagataaatactatcagtactagatacttcatggcatggcgggttactgtgctctttgcaaagatctacacagcacgataccgaagcgtctcaggctattctccaggtgtagggcagacataaacatatatcgactgcttggctgcggcgcatcgaaaattcggtgatggtcgcaatcggcagacagcagccccccagaagcgcaaacaggagatgcccctgttccccgtgtctcccccacttggaatttagttaggtggggcgaccggcttggcagggcctgggagaagaagcgaatgttccgtgcctacaattcacatcaatcgccggatacctacaaacagccatcacttgctgacagccccgagtaataagccggtctgccacgttgtgcagcatcgaaagcgtacagtagatatggacgccaacgactatctggtgtcctagagcatcctactgctgccagaaatgcgggggatatcaaggtctgctccacctcgaaacggccgggcttgttcagcacggacagctgttcggccgtgatggagttgctgtagttcatcccacaggcatcacagacatcacaggcaccacagacacaaatcacatcagcagccttggccacggccatggtttaatatgaaacaaacatcagtggcccatgggtgatcctcaactgatcgacaaatgaaacgtctttgcatttcttctttttttgggagacacggagagcatctggacagatcggctaaccaccttgcttcgacaagccaaacaatatatattaatacaacgcatctcctgcaggtaggcacccgcaacttttgaccacaatgtataatatgtaaaagaaataaaaaaacgtggtcactgccaatgcccgtggactgcatgttttggaaaaaagtaaagaagctatgtgatgtgtgcatccgcgtgtcatcgacattcttatcccccccttttctttttttcccgtgtgcgagtttaaccgtcgcccgctcctggtcctgcatagggatcgtcaagaaaaatggaccaagaggcaccgagagaaaagctacttttttgtattcttgttttttttttgtgttttttttgtatcgtccctttcgccacctcctcccctttcctcaaccccctgcctttttcttttctgtattttgcctgctcatctcgcccttctaaccaacacgttgcaaaacagtaaagcaagacgagtctacataacttcaaatctgttcagaaccacagcagacaaaattcaaaactgagattatgtatagcaacaaagtgtataaaaattattattaactcgcagcaaaaattacacagtggtattatgatccgctgttagcccaacttctatctctctctctcctccactccttttatgtagccagcaaacgaaagatacatgcgaagacaatacgaacgtctgaataacgacaaccatgagcttttccctgttttttccccctagccagcaaaccacacatccctactactacccttcaacccactccaaaccctgcatcactccccgtcctactgccccttccttccttcctctcttcccctatcccctctctcttctcaagctctttttctgttccccctttttcccttccccatccaatcctacaattcccatcccgtccaacccagcagtaggaaaatgtacatgtaaaaaaatatgtctgtctgtccatgtaccagctgctgaccatgttcagaatgaacacaaccaaaagaagagataaacaaacggcttttctactcaccccatttccccccatttttgttttccaacgagaaaaagattgcgagaaaaagcaaaaaaaaaaaaaaaaaaaaaaaaaaaaaaagagaagtcggcagagacgaggacaaaggaaaaatacaaggttctgtctgtgtttgtatgtgcgcgtctccaaaagatggggagagttggtccatatgggttgcttttgatcaagctctggctggtcaaacttttgctgaaacacaaactccttgggtcttttcttccaacacttcctcgtggtctccttatcatttgctcttcgcggcataatctcgagtgagggacaaacctagtaaacctgcccgattgctgccacggcaatagccacgaacccagccatgccgaagctggcctggaaattgaccgccgctcctgcagtgtagactggtagcggggcggaatcggatggtgtcgcggggggttgctcatggggaggagcgggagcaggagcaggagcaggagcaggagcaggagcaggagcaggagcaggagcaggagcaggaggggcctcgtaaggctgggccggctcgggcagaggagaggggatcacagggccggggccgccgatgaccggtggaggaggcgggacgtagctttgctcttcaacatagcctccatcatcaatgggaggggcaggggggttgccaccgccgcaatcactcggaccaccgtcgtcctcggggcactcttcgtgcggagcaactgggggagcccaatagtcatcctcatcatccgagtcagagtcggagtcggagcaagagtcggagccagagtcggaggaagagccacagtcatagccagagtcggagtcagagccagagtcagactcatactccggaacatgtgctgggactgggaccggaaccggctcggggcccgagcagcaaggggccggtggcggattggaagcattcccttgaggagcaggttgaggctgaatatagttgggctgctcataaggaggagcctggggtgctggaggttgggaattctctgccttgggaggttgggccggaggttgaggcttcccgcacccgggctgctcttcgcactcgggtttgggaggctgaagttgctgaggttgctgaggttgctgaggttggagctgctgaggttgggggtgctgttgaggctgttgaggcttcacacacttggtgggctcgtggtcggattcgcttccggagtcgcagtctgaatccgaatctgaatcagagtcagacccggagctggaatcgcagtcaccgtcactgtcattgcccgagtcgtccgaggtgtcccagcagtcatcgtcatcgtcatcgcagctagcgggctcctgggtattcacctcacagttgctgcccttgcagtgcttagcaggaggggcaggaatgaacggcccgcagtctgtcccattaccgcagtgaactggcggcggaggagggcagttgtctccctgacaaggcacgtaaggcggaggaggtggaaggcaaccagctcctctgcaaggaacatagggaggagggcaattgtccccatggcaaggcacatacggcggcggtacatggttgcagtgttcgccctcgcagggaacaggaggcgggggccggtaaccgcctgtggtgttgaggttgacatcccgcggggggaatggatgggcgtgttcggggtagttgggttggcaagattggaacggagggcagcggtcagtatcgatttcacagaatggagtccttcggtcgcagtattgaacagggcggcaagaatagccttcagggcatcgagctctgtgataatcatcaccaagattgccgctgtggccgtgaccgcgatcaaacccagatccgtcttggccaccatacccgttgctatgtccgtttctgtcgaagccaggcacaggaggcggtggagggatcggaacgccgtatggtccggtgtcagggcggccgtcatgatctggtagatgatcgggagacacccgaggagggtagagagggttggggtcgctgccatggttgttgccattgtggccatggccgaagtcatcatgtccagactcatcctcaaaacggtcatgatcatgacctccaaagccactgtcaccataggaggggaagccatgaccgccgttgccgtgacctccggggaatcctccaccatgtccatcgtgtccgccatgaccgtcttgtccaccatgaccgtgctgaccaccaggaacagggaatccggggaaaggattcccaccattatggtctttgttatcgtgcttgttgtcgtgcttgttgtcgtgcttgttgtcatgcttgtggtcatcgtgcttgtggtcatgcttgtgttcattgtgcttgtcatgcttgttgtcatggtgcttgttatcatggtgcttgttttcatggtgcttgttgtcatggtgcttgtggtcgtgcttattgtcgtgcttgtgatcatcgtgcttgtgatcatcgtgcttgtcgttattgccgcctggaagatgaggaatacctgggaatggactcttttcatctttgtcctcatcatgatgcttatccttgtgcttgtcatgcttgtcgtgcttgtcatgcttgtcatgcttgtcatgcttgtcatgcttgtggtccttgtgcttgtggtccttgtgcttgtggtccttgtgcttgtggtgatgtttatcatcgtggttgttgtcatcatggttgttgtcaccgtggttgtcgtcatgctggttgccgccaaatttgttgtccttgtccaggttgccgccagggaagttgccttttcctcccttctcatcatcaaaatcactataatcggggaagtcgaagcctggaccaccgccgccaccgccgccgaaatagtcatcatctgtccattcgctttcccagtcttcaagatcgccccgagacttgccgggtctgaagccagactctccatcatagccattataatttccttcatcaacagagtgaccccacttcttggaggcattgcatggtgttttgctgttcgggtggcagccgaggtcatactccgcaccggcaggagaaggctcggggaaaggaacctctgtagcggtggacgggttgggctgagcactgggggcagaggcttctggcttgggcgatggctgcggtgtaggcaaagggtctgaccagacagaaggaatggtagcagaggcccggacagaggggtagtcagaggcaaactcctgttgcccccccacctctagctcatcctgtagctcatgttgggcctcggtctcagcatcagtctcgacatcagtcgggacctcctcctcaacttcgatctcgagctcgctcttgacctcggttttcacctcagtcttgacttccacctcgaccttcggttcaggtgaaggccggggaaagacaagcgaggaggccaaaggagaagcgatgggagagatttgcaaagaagactgggcggatggttcggccgaggggtgaggactggcaactgtggcagctcccgatgttggctgccacgcagctacggttctggtgtgggcaatgggtatgacgatgggcctggttgagtagactgtgagacctggtctcacgagagtcttggtgtggcagaagacaccgctgccgccggctttgcacagtctgtcggcgagctcgtcatctccttccgcaccctgataaaagggaaggggagaggagatggggccagcagaagccgggggaatggtatcggctgatgctgcctcgagcggttcaggtgatatagatgacaccggaaagggagcagccttgataaccaatgcggcaccaagggccactattgaggccttcatggcttccggaggcgacgttcaacacacaggaggagcaagagggttgctgctacctcgctgaaaaaaactgaagaaggggtgtcgtggaagtgaccgagtgaggggacagaagaagatctagaaagatgcgtttcggggaaggacatttctaaattgattttatggctgatcacaggatcggttccgtgccgtcatcaatgtccggcttgcatctaggtttgttggggaaagcccccatgggccatggcaccatggactccgaatgtgttggactggagcggaccgacggcgtccctagcacggcatggaagacacgaaaacacagtattgacagcggggaccggtcttggagctgtcaagagtatgctttgtggcgtagttttggcgtgttaggaagtccgtattgaccagagaggggcttctgagggcacacacctctgccacatctcccattgccgaagccatcctgagtcggctgcgaggggcaggtggagttgctgccgagttcttcctccggacggctcagcctggggcaaaccttcaagtcggaatgggtacgagtacaggggcgagtgtggaaccgggtcttcttgggatcgggtcaatgattgtatctgattgcctgttcaactgacgatgccgtcttccccatggaaatgatcgatatcatcgactgctgcttccccaccctatcttccctacctcctcgccgctacctgttgcctggtgataccttcacattctctgcctctatcgaaaccatgaacctaacgccccaaatgcatcctaatcttcaggcactcccgaaaacagtccaacgcgcatgcggtgactctgtacgtttatcatgtgtgagaagtgacgtttccagccaaaggggaacaaacagactgaggggaacaaaacttacgacgggcagttttggaattacgactcccagaacagcgagaaagttgattgtaaaataggccaaatcgtagtgcgtatagtgcgtactcaggaggaagagcacaatggggacgctcaggagaaacttcttggcgggcgtgtactgggctccatcatcaatttgctcccacatgttcaggttgtcgtacgctccgccgttgaactcgaatggcacgccgcggacgtagtggaacatgatgtaggagccaaacatgtacgtgatgttggtcaacgtccatgatgtctcctgtgaaacgccggggagactgtcgtagaagatcttgaggccaaagatcaagacaaagtgaattgtccatgcacctggccgagagagagagatattagcatgggtcttcctctactttgagtccttccttgatcgtcttcccctctcagagcttgttacactctccgctgctccccccagccttcctgaaagagttgatttcggcaaaccagatatcacaaaagcacaaaggcaaaaggctgtacctttagcattgacccagttggcgttcaggttcggcagggcagactggtcgctcagttgctcaatcggctctggtggctcatggtagacctggaggatactactagacctccttcttcggccggccttgtctgccatgtttccgtgcgtggatccacgacgcggaggattggcgcccgcgtcgtaagagacggtgcgtggtatgaggattggggaagacagcttggcggtgttggcggtcggcgaagggtgcgacacacaggatcgagaagccggaccgggagcttggaggaaacgggcacgaagcacgatcggtcggccgggagttaggttggggagcaatgcggtcggtcgagcgaggtcacacgcggaggattgacacagccaatgccagtgccagatgtatcgccagtgggatgatgtcacaaccaatcgccgagctggacaacagacagcacaggaagaagttgcgtggtctgtccagaagccgagtgcatgagtgaggctgcggcggagagcttgtgggggcgtttgaagaatcgatgttccgtgaaagccgaagagaggtgcgtgaggcaaggaaggggtctgaagaggagacaaatagtggacgcggctcccccctgacaggacagacgggcactgatctggctgccctttttcgcgacgtattctgctttttattacaacgtgtattctgtagtaggtagtgtactgctcttcgagactcggagtgagagcacacaggattcaggtaccagagggagaggctgagcgggtgttgatatggagatgcagcgagcggaagttggctgggttcggcgtccgatggccgggatagccacgacagccagtgacaatggggaaaatgcgcaaatgctggtgagaggtggtggttcaaggtggcaatctggccagaatcagacccccccaggcgatggcctgtcaggtacctccactgcgcagattggcccgagattgcggaggagaagacgtgcagcactaacatttaaatgccggccattgcaaattactgcctgcggccgctgcgacatgtgctgatgggccgacctcgtatttattagggacttccatgccctgtaccctggggcgtagtgagatttgatagtgatgcaaccgactgtcaggcggcccaacatctgttgccgttaggctgctatcagagatgtgtggctttctctcccgcctgtttgctgcttgctccatttccaaagtcgacccacaaaacatcaacatcatctctttcatcatcaggcctcgtcaacgatatctacgtttttactctttactctttgggctttggccccggtcatggtgaagactgactgtctccccctaatactgtgaagctataccatcttgggtcttccccccaaagctacagacagcttacttatcaaggttcgagaacatcaccagctggcttggcagtgacagggatttggccggccgcttttttctcgattaattttttgacatctcatcgcggaaggcagaccgcagacgcgtcatcccctgcctgccgagacgacattaccaccatcattccctttcgtcctctcattcaccacggctattttaagaaccttcaacatggatacagcgcaagatactgtggtggacgaccacccagttgccaggaaaagatctctttcagaggtggaaccttccagtccagcaggcgaagaggatgtggactcaaccaggaaacgcacaaggactgtcgagcctgatgagaaggatgagggggagatcacagattccaagtctggctcgtcgccggcaccggagagcttcacgccagtccagcccttcgccaaagctcataatggctggaatgctggtgtcaatggcgggttgaggatatcctttccctcgctcaggaagccaccccaaacaaacgctgagggtgatcaagtcccagaggccccagaagcggagtccgggcagccgtccgaagaaaaaccccaggtccaaggtcagccagatgctgccgtcgagcttgaggcaaggccgtctattgagggtctgattacaccagatggatatccgagtcagcctaaaaactctcgacgacgatcctgggatgccaggttcaagcattggtgtattgaactgatgaggctgaacaaggaccacgagggagttaaagacccaaaggttctgcgagaggcctggtcgaactggctgcaaaatcgaaaaaagcaagacccgctggcgcagacggcggcactacgggcagctcaaagttttgaattcactccagaggccctcacagagatggcatcggcagctcttgctccggagaacgaaccagcatcgcctgcagagcagcagagtgaccgcagcacagacaaagcgaccagcgataccggcaaatccgaaaacagcaacaagccactgacaacttgggaggctggaggcatgacccaacccattcggccaaaccagtccgcacttcccctggacgccaaagacgaccaagcatgggaacacatcttcaccatatggtgccaggacttggctgaaatcaactccaagaagatcaagaccaaggaaccgcgagacttcaacaggatcttgacggcttacaatcaatggattggtacgattgatgggctgccgaaaatcagagccacggcagccaggcgtaatgcgagcaattacctggcgaagaacaagggcagggttgcctctctgctttctagtcggccgttagacgacgagcaagagacagaagaagaggagcccaaggagaaggaggccggggaggaaccagtcccagaaacagtggttgcggaggaaaccttgcctctcgcagcaccagtcaacgacgggaacgaggaggtcaaattcattccgctcacagagggggaaatggcgtaccgggaccggtactttcccggccttgctccggacgctgtcttttgcgtcatgtgcgcttcttcggagcacaactcggccgagtgccccgagatggcctgcaagttctgccacaaagaccacccttgctggacttgccctgctcgacaacgctgctccaagtgcaagcaacttgggcattctgtggctgagtgcaaagagcgactgatactagcccaggacgaaatggactgcgccctctgcggctcgcgcgaccacattgagtatagctgcgtcaacttgacgagaagcttccgacccaacccctccaacacccccaaagtccagtccttacccgtcttttgttaccgatgtggtgctgaggggcactatggtggcgactgcgggctcagcgcgctggagaaaaagggcagcagcttcaacccattcaccaaggcgaacgcaagccagtacgtggatccaaactcttcagagacggcccttgcctaccgcggcggtcaccggtctgcaggagattacagatcaggtggcagaccggatcttggtaaaagcattgtccctcgccagcacattcagttcgagtcagacgacgacgatgatgatgagttcatacaacccattgttcaaaagccggcgtggtctgggcacattaccttctctggatacagtgggaatggcagtcaaaaccaggagaaacccagcgtgagatacccatccagcctccctccaaagcctccggcggtgtcggtgcaaccactaccgcgtgggccccctcctccgctacctccagggcacaattcttttgggagaaaacacggcggtggaggaagtaggggcgggggcagaagtggaggtgggggtaggggccgaggtcgctattaacagcgagaaatagaagtgatagatgagataaagcctctaccagttgcgaagtcctgcaggaagagaaagaataccacgacatgatgctaccaatgatccacatgccatgaccagtccactcaactgctcctctctatgtggtggcagtttgaagcacaccgcttgcgaatcacagacgatgcagcaggggggggagaagtttcgaaacatttctgataggccggcagttgggcaccgggaggaagtggggggcgcgtcctggtcgcgactcaaaagactttctcggcaatttgaaagtgaggcctcggaaggcggtggtttttgatatgtccacgactgtgagcatgagcatgagcatgagcatgagcatgagcatgagcatgagcatgagcatgagcatgagcatgagcatgagcatgagcatgggatgggtgctccttttgagtgaaatattcgatatcggcatgtaaggaaacccaacgtgggccatggaggcctaaggcaaaggcgacattgttctggaagacgggcggggcgcttaatggctttatgtgatcggccgcggaaccagcatcgcgccagtttcgtgcaccaatcgcgcgtgtttcgcgcgacgtggcctgccaagagctatctcaacgttctcgacgccatcgattggacagaaagtcaccgtcgacgaggaccctgtcttgtcctcccgccctgtcttttatcgatagcgacttccccccctggccttccccgcaacttcaagtgccgtttcaacatctcccagtggtcgagaagaggcggccttgagacagcctgcagacggccgcagttgtcgcatgcaggtctcgtagcctccaggccactcaggagacccggcgcggtccgcacacgtcggtcgcggtcgcagcactgttctcatgtccctggccctaccttaaatccacgcttgtccagctgcatgtccagtccagagctgcagagggacatgggacaatgagtcactcaccaccactcgttctcccaggtcggccatctggggcgacgacgaaccatgacccctagcgaaatcgcgcacgagagaggaaccgcgaagggggaaaattgggaggttgttgagtcggtaggggaggaggaggaggagaaggggaagggggggcttgtataacttggtccacgggctttctctcgcgcgtccggtgatcaagaatttttctgttcccatttccccatcacacctcttctttttagatcaagcagatatctatttcccggttctcagcgagaaatacaacccgttctctttctctctcgtctctgacagaaatctcaggttctcaggttctcacctccacagcgtttgctatacacctatctcacttacacatctcacctacacacctcacttgaaaccaccacgttttgcttggcgcagggctcctggcagttcccaaacattccagtgttggttgtgtttcttgacgacatgctagagctatggcgtcaagtacacaattattctaccacctttggcaggaggagacggtgcgcgagagattcttcgagctcttgtccaagcaggacctctgtgccgtgagagtggccaattcggcctgctgcaatctcgtcaccaggcggctgtttgtccgcatcaacttgaccttcacatcaaacaccttcaccaatcctcaccgcattcaggccttgtcaaggattggccaccacatcgagcacctcagcttcacctttccccattccaatgccacctttctaccccctctcattcacccacagacaggccaggagatcctgtttctgtacaacccccacacgtccatggcttcggcgctcacaaggccaaagtatggcaattcggagctcggcgacatcctcacgcagcagtacccgcctcttttccatgcggccagtaatgttccctccttcatcaacgccatgaagcacatgaccaacatgcgccacctcaccatcagaactcccggccaggagcccagtgagcgttaccggagggacattgttgattacgccctcatcagcctccgcatctcagtcgagcgcgcgcctctcaccaagctcaccaagctttcgctctctggtgttcacccttcctccttcaactacctccgtcacaagccgggcttcggcgctctcccctcggcggccctccgatggcgtcaaatcaagaagctgtacatttctgtcgagagctgggacttttatggccctgcccccggtctcgaccacctcaagattattgacgactacatccgggagtttgcccctcagctggaaaagttttcattcacttggcttgggaggaagggaccctgccccattgccctctctggcgacccccttttcgccgccccaagacactccaagaagctgttcaacgaggtcacttcccccatgtctcctcttccgcccaaaccacttagacattcgctcgtgatgcccaagttgaggtgcatggcggtcaaaaacgcgacgatgaatgggcagcaggtgaagggactcgtcgccgaccatcggggcactgtcagggaatttgactttgacaatgtggcactcatcagaggcagttgggacgatgcgctgggcccactggtggacaaagaagagggcggcagtcccgacagctggtcaagaaaatcattcgcttccgcaggctcaaacacaagacccgggacatccaggacaaatacctcggcagggtctgcggtggcaaactcgtcggaggacgaagctgtcacaccgtcgtcggctgcggccgaggcaagcagggagttgttcgaggtcgacctggagggaatggtctttggcggcgtcaacgacgtcgacaacttcgaggccggggtggaggagtgggctaggggtgttactgctgccgctgcttctgcgtctgccagcaacgaccgcttggatgactatgatgacgtcgcctctgacattgaggccgccaagcaggcgagcgaagggttcagcacgacgcttaggaagaggagattgagaaagaagaggaggcaccatgaccacgatgaagaagacgagcgcaagagccagaagagcaccgaaaaagaaaaggaaaagagcactcgccactttcccggcctcggcaagagcagcagcaagcttacgctcaaacactcgcgcagccgcagcgacgagacggcttccaccacccccaaagaaaccaaagatcgtgaacgctctgaatcccgtcctcgtctccaacgtcgccgccgtcaccgtcgccaccactccttggatgatgctctcccagctctccctacaatgccgtccatgccggaggtggttggctctgacgacgagtcctacttcaactcgcagcacccttactatacctcccctggtccatccacgccaccccccctcacccggtctaactctctgtcttcctcccattctgtctccccggccccttccccatcccctaccggaaataacaggggcagctccagaatcgagatctcagtccctctcctcaacccggaccccttccccgtcctcctccagccaacagtttacgacccctcggccaagaccgggccgttcgtgtgctccgttgtcggagaggaagaccatgggctttatgaagacgacggtctgagcccagcacagagattgatcgaagcggacatgcttgccgaagcgcaagagcgtgaggctaggtcgtctgcgctcaagagagcgagggaggcagtcatgacgaagctctcgagagagttttcgagaaaggccaacgcgaacagtgaaaagaacaaggggtcggcggcggtgcagcaggtcgctgggatgatgagccttgccgatttacctttgcaccctttgcataccggaggcaatgctagcagccacaatgtgggcggaggcaataacagtatcggatgcaggatccgggaagggctgtttggaaagagcatggcgaatgtggccgagtgcaggtcggatcagcagagggtgaccatggagagtaacggcagcgtgttggtgccgcttatttttgccaggtcttgaggtggtttaatggggtttcttgtcactctttatcaacacctttttttctctgtcttctctcatgttaacgaatgaacggacggggatgacaagacacggtgttatgtatttatgattcaaggacggaaaaaaaggactggctggcatactttggcaaggtacaggtgcaacggaccggtcaaacaaagataccttgggaatggcatcatcgctggtgttggggatggcgggacatggaagggtgtgtgattgggcggtgggtggcagttgttttatgacatttacgaccatttttacgttactattctgaacattgttatttatcatcatcgacttgacgatcattaccatgatatgatatatctcaagtctctgtaccttacttatcttttggtatcaccgaactatgcgcaccttgaattctagaaatccctcagtacctaccttacctaggacagagacagcagacggtgtgacagggtccgaaacagaaactctgtgacactgactgactgctttggctgccaagtgctggtgtttcgagggcgtccaagaaaaaggcatcagcattgataacaatcccatgccgtccaaccaagaaagcgatcgaaaatgggcacgctcggctcactcagcagacaagacttcttgagatcagcgatcaccaagcgatgaagcgatgaggtgcagcgaccaacaggcatgggacgtgctccgacgaagtgcctgcaacggcttggcagcactgttctaggcccgaccgaagggccgggacgaatcagaccagagcttgcaaatatccgtgtccgccttcagggtggttgctagccccgacgggcatagcgtggacgtgttcgctcagcttccctgtcccaaaaatccttggaacctggagatttgctccatctgaacccgcgaacccgccgccgcaatcaattgagagcctcgacaggttcccgccctggggctagaagctcagagctcagacgtcgtttacggtttcgctttttgattgatttcgtccttctatcatctgtctgtcagtgctgtcagtctgtccgtctctcgcccgccttgtgcctgtcctgttcgtcttctttgtcagccacgtgttgtccccagcaatcagatcatccgaacctcctgacctgacaggccctcccgatctatctcggcttgctttgactatccgaaaaccgaactgacgcacataacccacagacgacacctgtcggccaccatcctgtccgcatctttatgactcggtcgagccggtattgagtctaatcgccgttcacctacgagcaaccgaagccctggatatcgccctccctcccccgaactgtcacgatacggtcccgtcgacacgcccaccaagctccgagcctccctacagcaagcagcatgcatcggccccgacagacccgtccagactgtcttttatagtctgccgaagtctgccgaagatgagagtcgcgatccgggagcagctcgcagcccttgtgatatttgccgtcctcgttgcgctcgccattgtctcgattccaacatggatatttgtcaacaattttgtcattggcgttgagtcgggtggtctgcttctgactgcctcgctcaaggctgcaaggatatcatccgaaatcgatctgattcagacaacatgtcttaccatctcgacgcgcttgatgctgcaacaagcattcaagaactattatcaagggaaaaccgaacctggaagcgaagatccctgggtggaagccgtcgccgatctcaaaagcgctctcggcagctcaggcttctcgggacttgtgcaaggccgcttatactcgaggaattcaaccggcaatgccaatgggctattgagtatcaccggaaacggaaacggtggccccatttatcttccctacctgggaagtaacggcttgccggttgtgcttggagacgatacttatggcaacggcttcccgcccatgctctatccaaacatcagctaccgaaataacggccggcaacaccagttcgtcaacacgacatccttctccgccgaggtcttccccggcgtgtctctcggcaacggaagtgatggaaatggcatcctgcttggccctctagttgtcaactccagctttgccctggtttccatcaccgtccccgttcgccagaacgaccagccccgttatatattgggatacatgacactcgttgccactgcgaataccttgatagatgtccagaggtctcgggaagggctgggtcgcacgggagtggtccttttcatgggctctacgaacccttggaatcactttgagaggcgggtagcggcatcgaatgaaacatggcaaccgccgccggacgagttctccaaagaagatatacacttcctcctcccaccccatccgccagaggatcaggatgatcgtcatgaccaacacagctatgagtcgggaaactttggcgctcctttccccgtaacttcttatcccatggttcacgacgtcttccgcaagcaaaaccttgagcatcccaactatgcaatcagcgacctgactactaccaacgaacaagggcactcggtggcggtgggtgctgcccgaccgcaaacatcactggtgtcgtgggctgtggtggtagaacaagatgcaaatgaggcctttgaacccattcacaccctcaggagcatcctcttggcctgtgtgtttggcaccttgggacttgtgctgctcctgatcttcccttgcgcccatctcagtgttatgcccattttgaggctcaagtctgccacagagaagtcgatcgccccgccaggttacgaggatgaagacagcgactcgtatgacgaagaaaaccccagctcggggggcacaacttccgggcggctatccgaaaaaacgatcgtgggcaagattcgccgtcacatccgcagacgtagacgagccaaggctcggcagggcatttcgaatgaacccactcgtcgacagttcaagataccagcacgtgtggaggaccgcaagcactttgtgacggacgagctgacggagcttacgcaaacattcaacgaaatgacggatgagcttttgaagcaatacacctcgctggacgagaaagtggccgaacggaccagggagctcgagatcagcaagaaggctgccgaggctgcaaacgagagcaagaccctgtttatcgccaacatctcgcacgagctcaagacaccgttgaatggaattatgggcatgtgtgcagtttgcatggaggaagacgacatcgttcgtatcaagcaatcgctcaaaacgctctacaaatcgggagatttgctgctccatctgcttgaggacttgctcagtttctccaagaaccaaattgggcaacaagtcagccttgaagagcgggatttccggttgggtgaggttcgatcacagatgcttgccatttttgacaagcaagtccgggagaacaaggtcagctttgctgttaactttgtcggcaccgaatacatcgacggaaacccaagtccagaacggacaagcatcgacaaacggcttcctgctctgggcccccctggtgtcggcaggttgaaggatatgtgtctctggggagatcagcatcgtatcttgcaagtcatcattaacctggtgagcaacagcttgaagttcacgccagcaggaggcaaggttgagctcaggatcaggtgtcttggtgagatcgagcagccaagtgatgagagtaggacatcgtccttctccaaaaatgggtccaaccgcccgggacgaacgcgtcatcgcatgggttccgggtcgacacattcggccagttccaagggcgggcagtctccagcgtcaccaccaccaaaaacagatggcacggcgctctccatcaaccccgttgatcgaaaggtttccacccacattcaaatcagagagcgctcaccaacacctccaccgccgaatgcaagaacgtacatgttcgaattcgaagtggaagacacaggccctggtatccccgagcacatgcagcaaaagatctttgagcctttcgtacagggcgacttgggcctgagtaagaagtatggcggcaccggtctgggactgagcatctgctcgcagctggcgaccatcatgggcggtagtatctcgctgaagagtactgttggtgttggtacgacgttcaccatgcagataccactcaagtacattagagatcggtaagtcaacaagcctttttattcatggtgatgacgtggtcatggctaattgtttctcgtagcgcttccagtacagcatccagtagtattgggtctcgtccacagagcgtgtcttcagcagacgggcgcgcggctgctgaggctgaccggcggaattcgctatctagagcctccaacgacgtccagcctccgccatctaccgtgctcgataagcaaccccgcctagtaggcctgagacagccattttttgcgacaaatctcacagcccgccctactgcagaggatcagttggccgtgattgatcgcgccatggaaaacaagccacctgagcaagggaagctccgcgtcctcgtggccgatgacaactcgaccaacattgaagttgtcagtcgaatgctcaagctggaagatatctacgatgtgaccattgccaaggacgggcaagaagcatatgatcttgtcaaagccaacatggagaacaaccagcgcttcgatgtcatcttcatggacattcaaatgccaaatctcgatggtctccagtccactcgattgatccgaaagatgggttactctgctcccattgttgctctgaccgcattctccgaggagtccaatgtcaaggagtgcatggaatcgggaatggatgagttcctgagcaagcctatccgacggccggcattgaaacaagtgctcaagaagtttgccaccattgaggaagagcccgagacatcaagcttgacgacaaagaaaacctcgccaaaccagaccccggcacagacgccaggccaagagagctccgacccccttgctctcaccaatggagacgccgttgcacctaaggctaagggaactgcccatggccctcgtataaatggttcggcctgaactgcatcttgatctcccgcctttcaatacactttctgtcatatctcttataatctggcggttgcttcttggacgaagatataatcagcatactatttcggtgcaaggcgtttttggattttggtctttttttctcttcgttcttccgagcaaggcgtagggcgtttgctgtttttttttctcttctagcacgattccaacccccaatctgctttttgggcgggtttctagaatgctcggtgggtttgccgtctctgctgctatgctggacgagacgggcttgcccgccaggatctgctatatctatcttctttgctctttattcttttcttaaccctttctcattgaagtgtaggattggccgagggcttcttgggatggggtagctcgtgtatatgggccatgtttttttttgggtatctagtgttggaccggcaaggcaaggggaataaaaagggtcagtcgggttttctttgtgccaacgaccaacataaaaactggtcaggagcaaaaacgagagaagatgcagaggtacatagtaatttttcttgtcaatttgttgatgggatgggtggccgcggtaggcagaggttgcttatgaggttggaagggtgtggttagtttgcaaatataggagctgttcttgtcttgagagtcataactttatgtctgaaatttgtgaatacatgttgttttgtagggtcagggcctaagggggtctcatttcaaaaagggggattcaggggtaggtccatattcacctctactatgacgccaaattgagcagcggccatttaaaattatcatcgtaatcatacaaaaaaacacttgcactatgaagaccctaggagaaggcacactaatttgctgcccaaacaacgcgactgctgaaccgtgctctcagtctcaaaaccaacggcaaaggcattcgttcaatgtgctcaatccaatcaaactccgtcagaccatcaacccgaaccaaaccaaaagttatcaactcaaaattcagaatgagtacatcctctcatggtataacctcttcctctccgtcttcccaagacaaactcagacctccccccctaagcatggccgttctgttgtccagtcatgtaagcactgaatgatctctgttgctattgtcagtcacgcagtcctttgtcaggagaaggggtctgaaagaaaaaagaagaaaacataccgcgtttctggtctgaataaacaccgtccctgggccggtgaacttgcagacgagaccttcaccagacgcaaagcccgaaatgatgcctcccgaggtgacccgctccatgatgtacttgacgttccaggcgaccaagtggccgttgtccacgatgtatttctcgccttcggccagctgtttccatgacattagcattccggaatgtttattgtcaagactgggcgggagaaaaaacaaaactcacgtctttcctgataatggcaccaaagctcgtcagccacaacaggcccgtcccgctaatcttgtacacccagagcccctccccgctaaacatggccttccccagcccctgcctcttgtagtccttgatcacatgctgcgtgctggcgagatacccatcgtggctcaccgaccacgactcgttcccggtcagcctcaagctcgtgatgtcgcccagcatcggcggcgcgagcagcagctctccgggaccggtgtagtgtgactggctcatctcgccgcccgccaccagcttcttcatgctgaacttgtaggagcctttgagctggatagacggggacatggcaatcatggctccgggtctcgcctcaaaggggcagccaatggcgagctggattgtgaggacggtattgcagtcgcggtggctgatgcggtaggagccaccgttgaaggtgcccacgtcgtctactactgtggaggtagcaccgacgaactggccagcggctggggcgccgagcagggtgctggctactgaggagggatccatggttacgggttgctgttgctgttgctgttgctgttgctgttgctgcttctcggctggataagaggcatccttgtcttctgtgggatatgaaggaggcggtgcgaactgttgtggctgctgctgctgctgggatgtctgtgattgactgcgtgcgtgtgtgggcagcgcagcgtgttgcgccggcgagggggcttggggtggtgatgagaattgtggctgctggggaggaggagggtactgctggggtgaagaggcagcagggggtggtgtggcagcagcttgaggaggaggagggtagtttctaccctgagagctgcttgggggagctgggtaggagaacttggtctgagtcgggggagctgacatcggtggaggcgggtagctcttctgtgctggataggtcaaaagttattagcatatggaattctctctactgaggatgtaaacagtccatcgtacttccagcaccggccgatccgggaggggctattctggtcagcgcatccagttgccagagttgagttaagcaataagactcacgaggataatagccggacatgctgtagaactcacgaatacactgagggtatgatgatgcactttctcttcttctattcaaacactgttagcattgcgcagcaaatcatgcacccttcagatcatggatccagacctacaccccgcacttacaagtttccccgcgttgatatcacaagggactcactttggtgacaggtcctgggtatcactgtagtttttgaagaagatgaagaagaagaatgtatttgacaatactaagggaaagtaacaagctacagcctcacgaacagacaaaaaagaggaacaggaacggggaagaggccaacccgaggcagcttttgaagggccgcgcaacgaacgaccccgcagccgcctccccatgcttttgcagcttgtcgaggctgcccaccacagcggcattcgaggggggaaaatggctgacgatccaatcagacagcttcacctaccgtgggcaggcacggggagcttatggacgagggcgcttagatggatgagtgcgagcagactgagctgttgattggccggccaagcataggggtcgtaccagtgcattcttcatcagcatccagccatctgggcgtcgattcggaattgattgcatggtgcatctttagggtatcttccatgtcgttggcggtctcggggctttttatagatcctgtcattctacacgacaatggtgcccttgagagttgtcacttcatccaaagtcaatgcatgggtataggtgaggtgtcacaggccttggcaatcgcagctgacggcggctggcacccttccaggaaaaggtccagaccattcccccaacggcccggtgaaatctccgcttacagataattgtccaattagaacgcaccagatcgaacatgattgcatcactgcgcatgtgccaaagcgggaggagcttcgtcgggagcccggagctatcctgacgagggaaaaaaaagatccaacgtccggaactcactcagcacacatcccgatcccgatccacatcgaaccactccgccgaccgtcccccggtgacccgctcggtgatcaacaaatcaacaacaacaacaacgacagctcgagccttgaaaaggaacgcccagccgttgacccttcctcagtcagccgagagggagcccgtgacgacgctcttcgccgcgccctagctcggcgttaacggagagacaacaaccccaccagcgcaaggaaccttcggtgacgactttgttaaaaaaggtggaagggcgaggtggactgtagacagcattgttcaaaccgacacaatttcgattactcacgccgtcatgttacgaacagccttcgggacgctcgaggcccttgtggagcggagcgccttgtccattaccagaaataccacagggagacagctttgggcgaaacggatatcggccaatacaaccaacggactaccatggcattggagggcgaggttgtcacagcttagacaggcttcaccaaccaagtccgcctcgaacaagagcccctcgaaagccatcccgcgccaacaactcaaaaactcttttttcacatcacggcggaattttcactcttccaaagcgaggcggggggattctgagtcggccaagaatgggactaagaccactgggtcgctgagcctgcgcgataggttgaagaagctatcgagagagtacggttggacggccatgggtatctacctggctttgtctgtcttggactttcccttctgctttctgttggtgcggactgtgggcacggagaggataggtaggagctaccccagtgtagtatatactgctgggacaatcaaagctgactggtggccttggcgttgaacagctcatgtcgaagaagtagtggtgtcgaacgcaaaaaaggtgattccggagcgagttcagaatcgatggaacgagtatcgcaagtcgttgaaggaagcaaagcaagagctcactggcaaggctgatgccgaagtggtgggccatggcgtagccgaagcggaggaagcaaacaagggagagggagccagtaagttcatgcggtgcttttgtgccatgtcacgacacgtaacctaacatttcgtctaggcttggcaacccagctcgcgctggcttacgctattcacaaaagcttcatcttcttccgcattcccttgacagcagctatcactcccaagatcgtaaagacccttcggggttggggctggcaaatcggcaagcgcccggtcaggccacacaaaaaggcatctgactaggacctcgagtaggctctgtggtctctggaccaagcggttgctcgcgcctgtgacaactgtatgccgacatatagcgtttgagtatggtatgtcaaagctgcattttgtctagagaaacctctccctcatagaatatgtaacatcacctctgttccacttatcgtctccttttgtttgacccgggatatcgtggatgtctcgagcataatatatggggggggggcgtcaaagttcagcgcagatcccccctgagtcctgtccaacatggaactgcggaacaattccgcaaaacacagacttttagctttctctctcgtttcgaaacgcaaagcaattccgggtcgccgaggcaagcgatgttagtgcgcgcgggctgcctcctgttagttctccgagtcgacgtcggagcatgtcgtcagagccgcagcaagcgactagtcctgtcaaatgggcaatgatgtgggatgaaatgtctggaggcggagacaactttgcatggcatggtcatgggaaccctgtgcattagtgcagaggtcagaataaggtttacgctactgggcaacgttcgtacaaggaccaatcacctctgcttctctggacggactttcaaggtttcctggtttcaaatcacgcctcgcgttgtcaattgctctcgtggcggttaacgggaaacccctcccgcgtcgtctggagaccgggtggtccctacgggagaggtacgaggtagcagagcgaggcatagccatggcccagtgacagggacttactcaccagggatggaccgtaccgaggctctggcattggaagagtggttgacggcatcatcatcattaccaatcgagggacactttaacctttgccctgtggtgagaaatctaacgcctacaggaggcagcccgtctccatgatcaagccccctccttggagctttcacagtcagatgaatcagccaggataccctaccctaggtctgcgttgggttcgagaataaggtccgatggttgcgggatcttaccttgatatctgctttccaggtccccgagaagtccccgactaccccctttctcatcgtgctccacgattcatcgcttgggccctcagctacatatcgctcgccccccatcccaccacccctccgaaaatacatatcttggcagacgtttgaagtcttacgatcttgacatcgacgtagtttggcttcttttcgctgtgagtttggcagatagcataccttctacaatcctgaaactcgaagtgaatgcaaaaatatcaccataaactgaccagatatgggagaccaagactggaacgataactgtctagtcatcagcatcccgtctcgagcaatctgacgtgccaaaatgggatgaacggctgcccatccacgtgtgcttcactcggacgaatgttccttgccaggtgctggttggtgtgctgagtagcttgcccaacggcgtttctcagacacctcttaacactttaccttgccttggacggaatcggaagctggccggtagctcgtggcattggccgaggttgccttacctccagatccccgccgctgtcagtttacgagacgctctatttcttgcttttcggccctgcggtacaaatacgtcctctcctctagctcatgaatagcgttctgcatgtccttcggacgcggaaaacgggatgcatacccacatggtggtggctgagcaaagctggtgtgctttgatccacccacgacttgtacctcacacgctccaacatggatctcgcttgtgttgccatccgatacaagaagggagggttctcttgccaatcaaataggagggaggagtcaagctcagcgatcacactcccttgttggcagccatatgaatgacaaacagattctgcccacttcttttgctcacccgtataaaccacttcctacccgtcttgcacccccaaaacccactaatcatgctgtccacacaggaacaccagatcccactgcccactttatgcccttgctgcctcgctgccatatcaccaccggatctgaccaccaaccctccttcccttcatacaatgaccaccgatcaacagtcaactacaaccaactcaataccgtcacagtcgcccgcaatggtcccctcctccctcacgacaccacaagaacagtccgccttggcagccctgcatgggctcacacctgaacaagagctgatcctgcgcgagaaagtaacgtcttcctcggtcatgttcgccttggaactcgctcgggaaagcgaggagggggccatcgaaccaacggtcgcgaagctcctcacagacgccttcaacaaaatctggaacaaagtcgtgaccaggcctgatctctacctcatgtcagaacaagaattcgccgtgttcaattattttcagtcattctggccggacaaggagattgcgagaaaggcagtagccaggttttgggacaacccttgggcctttgcgactcccgcaggccagcgccggtcatgacgggactggtcatggtctccacttttgccgtgccgcgaaaaaccaggtttggatcgaggacggggtcggggtcggggtcggttctcgggggatccacaaaccggaattgtggagctcaaccgacgtcttacagaaacgaaggcaacggcctgagtcagggctggcctgatggaacaaaaagtcagcttttccaaataattttcaaaacacgcggtccctggagattcaccgatagcctctcaccccccaactcacaaattaaagatgcggtcgtttgccggaactgcccctccgccaagccttttccccttttgatcaactgcctgcaccacggagcgggggaagacaacagccgataacaagccaacgccggctgccacagtttctgatggctgaattgtgccttgatgtttaatataccccttattatttattgtgcatgctatctcgggttcggagcgcggggaatggaaggacagcaagcggcgatgtgttttgaggttgcgcttggtttatcaggagtttggggaatggaggagggagtgttgcacttggggtagatagcaccgcatctgtattcacctctctctctctgcctggtttactgttctttcccttttgtatgctttttatctttgtgtttgaaaggtttcctgtctgctagtaacaatacattgatcgcaactgacaaaccaaggccaacaacattccccaactgcgaaacttgatggatgctgtcatggcgggccctgagggttgctacgatgaagatctaaaagaaggttcccctcaacgccctcttcttgttcaagacaccatcactcccgccaacaacggccaactacggcgccggcggcgtattatgctctggctaacggcctttttggcggggctaacgcttatttccgcacttcaccagacgccttgtttgaaagagcatggaccagcaacggcagcatcgattgctaagcatcatctcgacgatttctggcaatccctcagatctcgagcagcacagaatgacgatcccccgccagcccctgcccccatgcgggctgttctcaaaacctttgaagtctcacagccagtgcggatgccagatggcccagttgagagcgacggctcgacccggcatgggaatgagtacagccccaagctgtgcacggttttgctcatgagaagggactttgcgtggagctatggtgatccgttcattggtacagatgtccctttaccactatgccgcatttgcaccatgaaattctgtcgttttctgagctgtcgattctgatacaagagtcataaccaggggattatacacctcccgactgttttttcaacagagtggtgctcaactttagctccgtttctgttggcagacagtttgaccggcttgcggtgatgtacttcggggataccgaggtttgtaagtgtatccgccttcacatcatgcctcgaggaagtagataactaatagtaaatttctcagggagaacttccacagcccagcccaccgcgcctcccggaataagctggatctacctcaaggacatgacgcactacatgtacttttggaaacgccctcaaaaagtcatctttgacctgggaaacctgatcagtaagaccccgtgccagccgatctcgtccgtttcggtgttgacgtgaaccaaaagacgagaaatacaccggcatcttcaacaccaccatgacagccatcttctacaacgacccaaacccccaccccgccaacctagcccagcaagcccctccctcagacctgatcctccccatctcggcccggttgtcctcgaccaattcgccaagcgtgttcaccctcccctcccaacgtgccgtcactaccttttccgctggctcccttccccgtgacatccgccgcgcggtcgtctccctctccaccacgggacaggcaagcgaagaattcttctggtccaacgtcctcgagtcagacacggcgacattcgaaggtgaccccctcccggggctgtccccctttagagaggtgcagctctacattgacaaccaactcgccggggtgtcgtggccttttcccgtcatcttcaccgggggtgtagtaccgagtttgcaccggcccatcgttgggatccaggcgtttgatatcaaggagcaggagatcgacatcagcccctggttacctctgctctgtgatggagaggaacacacgttcgagatcaagattgccggcgtgggcagggatgggaagttgacggaaaaggtaggggacaactgggtggtgactggcaaggtgtttatctggttggattacgacaggaaggatgagcacgcttgtgcaaagggggatgggtgcatcactactgggctgaagcagccggtggttacagcgccggagcctgagattgtggcgcgcagtgaggtcaagctggatcggcagcagctaggtaatgagacattggattactctattgtggtcaagagaaagatcgagattagggggcaggtgtcggcttttctgggccgggagaagatgcaggaagtgaaatgggtgcaggagctggcgtattcaaatcaggggttgatttctcagcatggattgcaggcgataaatgatttgacgatcgaggggagagaccaggctgggtttgtttccaacgatctggagaaaggcaaccagcggggagggtatgaggtgctgtatcagtacccgctgtccgtgaactcaagctatgcggtatcagaacaggggaacttgagtatttgggcgcacgccattcagggaaggcaggtagaggtggacggatggggaggaggggtggtgttcccgaccggactggaagcctttgacacgggatacagcaggtccaagctgtacacgatcaaagagggcatagcagagtatcgccagacaggcgatcagatgagcagtacaggatggggcgagtcgagccaagagtttgagtttacgggtgacggagaagaattgtactggaggagcgtgggggctgtgaatgggactgttatttatgaccggaagagaatgggagggggtgtgattgtgggaggtcccagagtagtgtctcaagtggcactgaacggtgacggcgtctctactcaggcttctggatatgattctggagtggcggtagcaaaatggccaaggttgtttccgaaggaaaatggggcttgagcctgggtttgatctattgattggtatgagacagtagcacagccactgtttattttctcctcttgatgatgtacccacatgtcgatatggcaacgtgttgagtgatccggagttacggataatgggaggtgggtgataatggcaccacggatggcactcttttctcataggtaaactgggaaaagaggccgccaagatatttagaccaagagcttcacaacaccaccgggtgccaagcctcggtgtggaatgctcaccacaaccgggcacggagctctccacgagtcccgagatacgggtgcgcggaatagagtccattgttctccggagccgctgctttggaaacggggttccacacaatgagggggagggggagcagcacgcgtggcactcatgcatcgccgttgctgggtcagagagaacaaaaaggctgaaggctgtcatcaggggtggtggactgcaaccctcgccacaaaataattgacatacaagtaggttaactcataccatattgtgaactatgccctgaagataattaccaggccctcaagatatttaataggcctttccagatatttgataggcctatgaaaatagttagtaggcctatgaagatagttaataggcctataaagatagtaataggccttttaaaatgcttacaaggcctattgatttgcttctaaggcatgggtttatgatatgggacagcttatttgctgtctcaatattttgtgaggagtgtgacggcttatcggagcattggcccaatggcgctaacggcttcaaacagaaaaaaaaaaggtggcttgtgtcccagccaaccgaccccatcacccttcaacatccttgtagcagatcacagaatgtcttgcgtggactgaggagctggcggtaagctcggcgcatggctatggaggctatggagacacagaaagtttgtgtggatgagagtgtcgctcttttggagcagctgtttcggactggggcagacaaagaggaattcggggtcgtggacggaagcgccattgttgacatgcggtgtcgacaaaaggagcttgggccgctgtcgccaccaaaaaactgccgtcattgccccacttttcagcagtgttgtgcaacagctcgatgatgctctttcttccccagtttcccctcggcccatcctgggcattatctcgaggttgtatggctccttcttttgttgatcatatgtgacgggctgctttcttaataataccgccctccgatttattgcgactagcactcttagccagcctaaaaaccgaacccccccccatccacacatcccaaaaccacaccatccatcatccgtgcagaaagtgacgactcgcattcctgggcacctacacaccggatagccaacagttcgcctacaagaccagaactatcccacgagtcgtattatatttctcagcacacattaaaaaaacaacacctacccatagctatttacgtcacagacctcacctacacgaattgccgaattgatccagttccgacgacaaaacccgacgacagctactacctcgcacaaggaaatcgccaagatggaaaaaacaccgctctacttccgctcagcgcagctcctcttcattctcatcaccacggccctgataggcaatgtgatcgctaccaacgtctcggccgcttcgtcggccacagcagccatcaacttcaccatgttcgtccttgtaatcacctggctagccgccctttacggtctcatttccaccgtcgttgagcgtctctcctacccggtcggccttctcgccctcgacgctgccgctacgctcttcacctttatcgccgccatcgtgctggctgccaagttgacagttgttaactgcgccgacccaggcgataaggcggccgattggattgcttacggcagcgccgacgataccaagcggtgcagacagatccaggcgtcgaccgtgtttatgtggttcttgtttccgctgttcacggccgttctggtgctgagcctcatgggatttcgcagggggggtggtagcgtgaggactggtccgactatgagccagattggcgtataagctgcgctgacttattggctccctttggttgttatgaacgacggaaagaggaggaaacaaatgtaatgaggattaatgaccaacgccgagagggctatgacgagggagattccctgggcttcgtaatgataagaaatgatgggaatgcaaaggctggggcatgtaatgatggattaggtacatggtttgggagacgggttgtctttgtttgtttggtatataagtgggatcgtgtgtttgggatgcggtagtggtgcccctggagctgtacactcaaaatagcaacgatgtcgataggtcgacttgaataccaacagttgtattatctgcgcatttgaacgacaagttcagtatgccgttgatgtagctgttttcccatgttttgtgccgtgtgtatacatatcccaataacgccataaacgcttcgcggggctgccccttatataatgcctctaatcagttgtcgaaaagagtatatgtactgctcagaatggctcttcccagcccgtgaaaccaccaagtcataacgaagaagccgcttgtacagctcccacggccgcaaactctctcttatttgtccaccggatctcgacgttgtgcatccattccatataccgcgcccagcctgaagaactccagttagcattatgggacctaaaagcaaccaggcacaagagccagcatactccagtaggcaaacttgcggccaagatacttgcccgcaaatggcataataatcattgtcagcaaaagctgtagctgctctagacttgtctcccactccctttgggcatcggattcgtcttcggaatcgagaatgctgctggagatggatggaagggaatcgacatcgtcgttgtctgaggagggagccatgtcggagatgacgaaggagtctgaagtgctcgccatcatggagcttgggcgatgaggtggggagcagagcagcgttggttggagtacgtcacgatgtctgaggacggggggtgaatcgggtctcggtagagctttcactagagtgaatggttccctctcgtggtatcgtggactgtctacactagactcgtggcaaccggcgcagtggtgaatgtattgtatgggtgcggcaacctaagcatggagcaatccagcattcattcacctgtcccactgggcgcctcgcttgtactgcagtagctgctgtagcgggctggagtgctgggcactgtctacgcactgtctcctcaccacaaggcttatcgttgtcattatcggcagctggcagtgaggtgggagcaaaaaccccccgcttgtcaggtgactgagggcctgagtcacaatgagtgaatccaacgtcatgaagaaggcgccaagtcagtgatagggcgaccatctctacacagaaaccacacttgttcggctcccgagaaaaggcaaggcattaggaaacaacctggcaaaagagacggctgctgtgaacccagcacttgttgcaccccacgaaccagcgcaccccgatcccttccctcactagcgaaaaaaagcggtggagagtccagaacatcttcgagaaacgagaaaaccaagaaccctgtgacatccgtggccaaacatgagcactgaagtaagttttacatctgtctatcctagccctcacctcccgccgtttcccctcaccggcacaggcacgagcacaagcactcccacagtaaattcactacccctccaaagactaccctcctctttttttttctcctactccctttgcgccacccgagaccctacccacccctccccttgtccctttgacggttgactcttcctttaaccaccaaacccgacaatcgcccgcccctccggaaattttagttccaaagcgactcgacaacctacgactgcgactcgagacaaacagcatcactaacatcgttaggaaccttctctccaacgacgtgcctcgcgcaaatcagttgccttcaccgacgagaagcttgtagtcgacgcagacggcagtgtaaccatggttgcttccccgaacgacgataccaaagagacagccatgtcgcatacccctcgtacgccgcctctctccgccgctctcggtgcctttactgatgctgcctctcaagcacccgccgccgctcctgctgaggatgctgacgggctcgatctcagactcatgaagaaaaagaagaaggcaaaggtcgagaccgctgagggtgacgacgaagccgccgcccccgctgccggcgaggagggcatcgatctctcgctcaagaaaaagaagaagaagaaggttgccaaggacgatgatgacttcgccaagaagctcgagaagctcaacatcgagggcaaggagggtgaagaggctgctcctgagtcggaggagcaggagggtgactgggagaagggtaccggcatcttcaagcacgacgagaccagcactatcaactacagcccactcctctccagatttttcgccctcttgtcgcagaagaaccccgaccacgcctcaaccggcacccgctcctacaagattcctcctcctcagtgcttgcgcgaaggcaacaagaagaccattttcgccaaccttgccgagatttgcaagcgcatgaagcgtgccgacgagcacgtcacagcctacctctttgctgagttgggtaccagcggttccgtcgacggttccaggcggttggtcatcaagggtcgcttccaacagaaacagattgagaacgttcttcgcacgtatattataggtatgtcgtcatgtctctgtggctctcttgcccgtcggacgctaacgcttcgaaactagaatatgttacctgtaagacgtgccgttcccccaataccgagctctccaagggcgagaatcgcctttagtatgttttcctgcccctgccgttcatgcgagtggcagtgcactaacaacctctcagcttcattacctgcaactcttgcggctctcgtcgttccgtccaggctatcaagactggtttctcggcccaggttggcaagagaagaaagaacaaggcctaaacgccatgatttcttcgtacagcatcggcttttgcttcggtcgtttttttgggtcgggattcataaaagcaacaacggcggggttttttccttttaatgggtattcgtattgctcggtagagggaagctttcggcagcgctgtttctggtcgatagatgctcatgttgctggtgttattcgacgctattcaacgtttgttggaggtagactagtcgaccaaaaacttccccacacccacacccctttcttgccttgttgatatgacggttgacgatgggtataaggggatgggaatgacgatcatgacgacgaacataaagacgggggagatggggcaaacggatgacatgcattcgaatggttagagggcaaggttgggtggttcattcggacgcaactggtctagcatctttgtcaacctagaatgtgcgttaatctaatgccgagtataacgaagcgaacggaatattgagagaagtggtgcctgatttgatggtgtcttggtgatgattcttgatgaagctgcgggtggcggtgttctctctgccaaccttcgaacaggcggaaaaagaagtgaacgaaaggggagagacgagaacctcgaggaggggaggaaagacgacggttttgattttgtggttgtcctcaatatgtgagtcattctattgatctatctacccatgcccccactacactcggcaacaatggcgacgcgaagacaataagatgaatgcattgaccttctctcagcgagtaaacaatggggatctctgccggctacgtcgtcactgtctcctcatctttgaacgcacgctgcgcagagagtaccagccacattacaaatggtatatacatagttcatccaacacgggctcttacggtcaatacagctggcatccttggctctctctctttctctctctctcttccgcctttatacgcatacaggaccagacagctttactctgctcagtgatcaaatcacggattttgtcatcaatttcttcaggcatgtatcaaggcaggacatgaaaaatcgcgtaggatagataggtatagggtaaaagtgtaaaacaagagagtgaaaaggaaaaaaagaaaataaaacaaggaaaacaagaggttccccttctctctcagaccagaggggcaacagtacaggcacaatggtaacgagacgacgggaagaaagacaggcggagcaggatcaagagtttttgaacgaatcatgcttgttgttcgtgtgtgttgtgctggtgttgttgaagagggggagatgatgacgagtgttatgtcttgctttccacaaaaaagattccttgaaatccctttcaacccattcttccccatcccaagaccccaagtccagttcagccaactggctcccggcttttacctccccagaccctcccccagaccctctccatttcacccctttacacgtattccacaacccctcccccctcccacaacagttcccgtcgatacgctaacagaaaaagccatacagacatgctcgagatgccatcctccagagactacccctctgaccctatacttaagcgtccttcttcatctccgcctcgccgctaggtttccccgcagcctctggcgttggctcgggcttcttctcctgctccttcccggcagcagcttcgccgccctcgactgacgacgctttggacacctggcttgcgagatccttatcctcctccgagttgtcaaacatctcagtgtcgtctgagtcggtcagcacctcggtcccatcgcccaggaagatgatgcggcccttgtaaccaccgatgccgaagcttctgccagcgccaccaccttgcttgttctcttcgacatcatacccgctgtcactatcatcaaagttgtgatgcacgccggggccgcggaactcagctaaaatgtgtgaaaaagccatgtattagtaatgatgttttggtagaaaaagtgtgcggtagaccagtgtcaagagcgcgctcggttccgaaaagtatgatgatccatatgaaaagggagacgagaaggagaaagatacaggatatgggggcaggtggtggtcttgatgtgggcggaggaaaacaaccagagcgtgcgcgtttaagaagacggcgaagattccctaccatattcgggcggggcacaaggaccgtctccgttggcaacccgccgggcaatctcctcataccactcttccttggtccgtcccctgaggaaagcgacaatgatcatggtcatgttgtcgcagccgacgcctcccgtctccgagttggaggccaggcagttgtccatcatgttctcgcagatcttgtccaaatcctgcttggcagcgattccacgcctgacgaattcgacaacggcttgggaagactgacaatcccagatgccttgtaaatggacaaggtcagcgaacagtccaagaaacaggggatagagggggaaactgtaccgtcacaagcaagcacgaggaactcatcgtcgtcgcccaggtcatgaaccacaacgtccggataagctgtcacgatttgttgttctggcgcgagctcggcgctcttcttgaattcgaaatcaccaatggctcttgacagggccaggttcccgttgacacggccaaagtcgacaaagccacctgcagccgtaattcgcgccttttcgcctacacatccgcaacacaatcacccggttagcggacaggcgcggctagagaagagtgacagctgtgttttcggcgcaccttcgttctgtggtttgtggtcaaaagaaaggggcttcgcccggccctttacgcccaagacgcctctcgagtcaccagcgttcgcctaccgcggagaggcaaagtcagcatcagtgggccaaagtgggggtgcacaatgaggggaattctcctcagcagcacggggtcaaacatacaacatagatcttgtcttccgtaatcaggcccacgcaggcagtgcagccggacacttcctcctcgtatttgggatctgttcaggaggcagcaacaggttagcgaactcgttccagaaagggcgccattttctgagtgatttggggatgttgaatcacatagccttcctcccctagcaaatctggaccgtccagaaccccccgttttgtgagaataagaagaccagactggcatcataccgttgagaatagctctgtcggtcgccaaaaagccatccttgagagcctgttcgtagttgccggctttaaatgtatcctgcttcgcaataatgttgtgaatgttgtcgcccgcaaacagtgctaccttgtcgccgccgtggccatcaaagacgccaaagaaggagagtttcgagctgtggtccttggcagccttagtgccagcgagcaggtcgagtactgtcgtgtgagagtcctccatgctgatgcgccagccctgcatggccgacacgccatagagtagtcgctcgtctccgccattctctgaagcctataggcattatccctgccgcgttagcctctggtttttgtatccagcgcgagcagctggaagacgatattggcaaggaagggagccatgggcgcgggcatgtgagcaccatgatcggcccctggcctggggaggagagcttgaggcagagaggggcagacgagcaaagtgtgtgcgcgcccgcgatggccaggatggcagcacggacggccaagggctgcgacaaccacctcttcaggaaaaggcacataccttctcgacaacaggctcagaaagtgtctggcccatgatgacgcggtggtgatatggaattcggcggcagcagcgcggctaccggtggtcggtggggggaggggttttggtcggcgagattgggcagaagggtgaagggggaagggagggcaggcgacacagtcagtttaacgacaagtcgattttgggccggaccgagctcgtggggtgggcgatgccgataccgatgacgttgatgtcggagatgggaatcaagaaaaaaaaagggagccgcgaaaaaggacgtcggtgatgtggtgtaatgcggtatcccgtagtcaccaggcgctttgtgttatttttttttccgttaggtgttcaggtcaggtcaggtccctttctttggcacagtcccaggtcgctgggcgggtttggcgggtttgcgtcctgctgggtggcgcacggagcaaatttgtggtggagcggggttgttgttgggcgggagccggccgtgcctggaagagacagcagcagagagacgtctatcttttgtggtgtggcaattgtgcaacagctaggcggctagctgatgaatgacaagcagagtagagagactacactatcttccatatgtcatcaacaatctggactagatagaccacgagtagagacaagtgcgagattaaacactacatacaagagagaggcgtctcagaaacaaaggactaggatctgctgcaccagacacatgggcacatccacttccagataacaaccttgtcacctctcgcaaggcagaaagctgtgatgctattcagactgcctgccctccctggccaaaggatgtcgcgtgtggggtagctctatctatcagtcacagccttgacagctctacccagacagtcataggtagataggtgtagctaaggtgcctggaacatccatctcatgagcgcgccttgagatatcaggtcaaccacctcagccctcactcagctcatcatcatgcgaaacgcaagagaaggtcgttcctgagtcgacggctgacggtctggcctctctccagtcacgctcgcagtggactcctgccgataccagacctcacagtgcgcaaaaaaaagactgcggggcaatgaggagaccgtgggctgctaaaaagggaagccggggttggggggactctccactgtgccaattcctacccctgcggctgcctggagtgcctgcctggtccgtccgcactttctgttaaggctcaggagcacaagatttcagcgtcacgagaggctgcgtattttaccgtattgacttccttggcgttttacacccatgacgacattttgtgtgctctgagtaacagttttaaagcacatactatgcaacatcccccatcatttggatcgttgaggtcaaggaagagttcaattctgggtatttggctaggtaaacggaaaaccaaagatattagaaagatattccaatcaaatatacaccgcaaagtctgactcctcccccctactcttgcccgacattaacgatacccctttcgactcactacgcccaggcagtccagactggtcccgttggaatcctctcttgtaacctactgcagcacttatgttggacggctgtgtcctcgatgacgtcggctgctgctcccgtttctcatttccagcaggagtggaagcgtctcctggtcctatcgacacgggcgacggcgagtcgatcccggcatcccagtctttgataaatggtgagtcttgcaacacgacccagttagacggtgtgcccatatccttcttggccgtttccctctgtggcgtgtccatgctcacgactgtctcatccacccactcgtcgtttgtatttgtagaaatcgattgccatgtggccgacgggtggaaaggtgagttcttgaccagatcatcataggagagacccaggaagtcgtcgggtgactctcgccagtcgggtagagggggtagagagatgtcttcttgagaggcgacgcttggagcaccaggtcccccaggggttgtgggcggcgcattcacgggaatactcatcccactctggccttgactgaggatcatgccttccagactcgcatcggtaggccccctcctggttactggccgagccagtggaactgccccaagaagtcttgcacgaggaggcggtgttatctcaggcgccatccccgcatcggcataccctaggccgatagactgccctgttctcttgtaggcaaatgtatcgaccgtcgacgtactcggttgcttgctatgtgtccttgagccccagcggagcttggagctgcggctcctcaagttgtttcccctgaaccacggccacatgaatctcctcgcgatttccggcggtccgtaatgtgccagtctcgattctgctcgaagcggggacgtctctgggtcggattctgccgaggaagaacgggaccgaggacttgccatcgcatgaggttgatatggcgagtttggagagtcattgtacctcgacctgggcgtcccttgaacgctgggaatgttgatctcaatcccgtcccggaaagaccctgttgtcttgttcccaagcagcccggctgtacgtgcatccatctcgcccgcctcgtcgttaacacttctctcggaaatagacgccagagagctcccgagccgcatggcaccaaaacttccgccccctaaaaaaggtatccgtccgccacgggcacccccgtgcttggaccggacgctcggggggagtaacttgacggtagccagggatgtaggcgcgctccccttggtcgaaaacgagctgcgtgactcgacgtacatcttcttttctggcgtaaacacatcgccgacagtgaagcttctgtcaaagttgtgactgatatcggggagagatggcgcggtgttgggtccattggacgtgatcacaaaagaccccggtagaggccctgagatatcgcgagtggtaagccgtggcctttgcttcgctttttgtcttcggtagcaccagaacacggcgaatgccacgacaaaagcggataaaattgttggcaaaagtatccccaacaacaccacattgaccttcccgcttggagcagcatctcccccgactgggaggacaccgccgagaggcgttgaatctgcatctgagggcgtatcggagttaggtgtagagtgtgctgccgctcgaatgagtagtttcatggacagcttgtcagacttgttggatgatctcgattgcgccgagacctccagcgcagcaatggtgtctttggagacagagggagggtgtccagacagggtctttcggccggcgtcgaaccggatccaggatgctgagtcgccctgcaaaactgaaatctcaatgtcgtctggattgaccagatggggccggaaatcaaaggaaaaatgttggccaggggtggctgtcaagatcggtaaacttcctttgaagacaccagccgccctcgtggcctggctttccacgtccaccagcatggtgatgttgagagtatcggagaaattgtcctgaaatgttatggtgaaattggtcgatgtggacttttccgtaggggtgcccgtaatatgccagctgtctttgttgacagacagccaagcaggcatgtcggaacttgtgttgagtgtgacctcgccagtgctgggtggcttcccgtcgagtttaacgatatccttcagcttggtgtaagatacaggtttccccgcgacggcagtcaagatgatggtcgtttcctctgcagagatttgatgaactcccaccacgagatcgaattgcaacgcggcacctgcgaaacctgccacatcgctagcaaccaagtgaaaagcgaagcgctgtggcggttgtatcaaagagtcaagtggaggcgttcgtccggagaaggacagtttgtctggatcgaatgaaacccaggccgggagcggtgtattgtcagccatgacagcgtagtagcctaagcgactgttcgagacacttgtaaacgtcttctggtccaaggcgaaggagaatggcgcgtctgggccagacagaatcgagtatgggctggaaaatatgccaaagtttggtatttgttgctccagagggatcccgacattgggtcctcgatttcttgacacaacaagcgtagcttcatgtgttgttgagccggtctggtctgttgccaccaagtttactggaactcccaccacctcgcctggggcgacatctccttcacctggcgtgccaaaaagacgccggttgctgctgtcgatcgagagccatcggggggcattggccagcgtgtacgtgagggggaagctcgaggtgaaggtcgagggcgagaagacaaacgcgaagggctggccgaaccgagcaaccgggggcacctgcgagttgatggggaaggagacggtaggggcggccgctacgaggtctgcgaggaatattgatatccaggccgcaagctgaggcctcatgatggcgacggcagacaagttgctgctgcgggtgagagtaatagcagcatgcaggtgcgctgaatacgtggtggtatagacaagcaaagaccagaaaagacagcagttgcagaatgcctagatgcaagagagaaaggaagtgttgttcatgtcgaagaggtggtggttgtcatctgggacttcaatcttcaactacggaggccaccccttgctttcactgtgatgagaatgagaattgcacccgttactagggggcgcagtgagcctacagactgtccctaaattcttaagaatggatagtgctagattaaattgaacagaggggaatgtcgagtccattttgctgggctggacgttgaaacaacgggttggatgacgggaaaacattccagcgtggaggtcttcgcgaaggcagggagagacaggcgcgtggtgaggactacacgacgtgtacgtacgcgacgacccgggtattggcacccttaaagatgagatgaggttgagaatggggtccatggccgggcaggcaagccagattatcatcttgatatcagataaggagagatcggccgccaagcttcgtggatgtagcgggccaggggacgttgctcgcgcaaagtgggcggcggttgcaacccaaccccaaccataaaaaaatgccaaaaaaacggcgctgagaccccttctccaaccccgccataattcacatcaccagcaaaatacacaaaaaacatcattttgatattcggccttttccgcaccaattcgcccagtatgaacggccgatcaaggtcatcgtcgcctgaaatctcaccgctggactttggagaggatttggctcctctgcccgtctacaaggccgcggccaccacggccctggacttctcaggcctcttggatgagccattaaagcttcatgaagatctctcttcgggttgtggaggacagctttggcctgcggggatggtgctcgccaaacatatgctgcactatcatcgggataagctgcagacctctagagtgtttgtgccctcagacgctacatgaagatctttttgatgccgggaagtttcccagctttgggacggttatgaactgacagacatctccaacttttccagtctcgagctcggtgctggcggcggtagtgtcggactcacgattgcaaagggctgcaggatagaccagcccctctacattaccgacatgatagacatggagcctctcatgcaacacaacattgctctgaacgagctggacgaccgggtcagaggccgcatcctcaactggtaagttctagctgtgtgactccccggttttattccgtgacattgttgggtagctggcggttggctgcgttgttgtatgggagtttgttctgacggcgaatggggacaactcaggggcgaacctctctcacaggaaattatcgactttaagccagataccatcctcgcggccgactgcgtctactttgagccggcctttcccttgcttctgcagacgctggaagatctgctgacgctgaacccttcggccatcgtgtttttctgttttaagaagagacggcgggctgatatgcagttcctcaagtctgccaggagagcctttcgagtgactgagctcgaggatgaagaccggcccgttttcaccagagagggcttgtttctgtataccatcacagcgaaataagaatgaaaacttttagatgattggttgccatactgtgtgctgtcgagtagccgccgcccttgagagacaaacacgtatgcactggatttggaacgccccgcggcttcagagcgtctcggcctcgactcaaaattactaagaaaagagacgggactatcggtacttgccatagttattgctgatgttgaccgtagatgaggcccggagcaagaaccaaggttctcaacggcgtgtttctaattccaagtcaggctggtaaaaagcatgtcacgaatggattatgtttccccacggaggtttgcactcagccgtgccttaccgagccacacccaactttcggaagaacagtttctctcctgtcctgatactttgaaatcgagattcgcgacttggtctggccgaagttgggcgaagtgtgcatagtgagagtaagagagtgagacgggagaatcagcggcccatcggatggggtcgccaccgcagtgttgtgatgcaagaaagaggggaaagagagcagaatttttttttcttctgcagtctgcagtcagtctccctcgaactggaggttgtctgttagtcgatgatgaatatgagtgggatgtggatggcgactctttggctcaagctggagggggtggggtagatcgaacgtggccttccttcttggcggcgtctgtgattggctgcggtggtttccgcattggatggcagttggttcgcttccctggaaaagtcagggctcccgggacttgtccccgtgccttgcagcatcctgcaaggaacaacacactggcgccattttctgtcgagattcggacggcagggctgtgctaacatttgctgaccccccgcgacgatgtacccgccaaagccctgttagctcggtacacccggcaccgcagcggccactaacaagcaacgcggtgccaaccacttattgcaagggggcggcttaacggccgcgtctccaatttcagtaccgtcccaggccttcgtgttagcagagagacgaagcgcgatgctgcccagcatgcatcgaatttggcgagagaaaaaattccaccaggcctgcgcctctcagctccccagctccccaagtccagcgtattccaccacagtcaaggtccggaaccccccttgccctggtccttgctggtgccctcactcgtttccctctcttggccgcccaaaacactgggatggttcataaaccccggcatcttcccttccacatcttctctccttcatctcatcgttcgctgtctgtttcgacccaccgacaaccatacattcattcccttcttgaccaggctcagtgagctcaccttcattcatcaataaccaccaccacaagataccgtcgaccaacgtcctagctgacgttcactcaaccttctttcatcatctgtggtactcgattcacagcggcattcacattccttgcccataagcgaagcgggatcccggagacagatcaacaagacattcagcaaccgcgcgtttcaaccactcatttatcatcatgaagtccaccaccgttctcgccagtctattggcatctgttgccctcgcccagcctcaccatggcggccacggccacatccaccgcagaaaggcccatcatgacaagcgtgccatcgtgaccgagtgggtgaccgagactgtccacgaaactgtgacggttctcatcgacgagagcaccaccgaggtcatcctacccaccaagcctgctgctgccgaagtcaaggtgtcggacctccctgagccccgtcctggccagttcttcgagagcctaaagtccaagtcatcagtgggccccgtcacatcagtggcaccacccccctccccctcctccacctgttgtcgtggagccaactcctactccttctccccatcccccacctgttcctgttcaggctcctcctcctgtccaggcccctcctcctgtccaggcccctcctcctgtccaggcccctcctcctgttcaagcccctgctccccccccggcgaacaacagccctcccgctgccaaaggtggcagcgaatccggctccagctccaaacccagcggcgaagttcacaacggcgatctcacctactacgatctcggacttggtgcctgcggcttcgatgacagcgggctcgaccatactgacaacattgttgcactctctcacttgatgatggggactcagtccaacggcaacccctactgcgacaagaccatcaccgtcaaggtcggcagcaagaccgtccaggcccgtgtccgcgacaagtgcatgggctgcgagcgggaggccatcgactgctccgagaagatgttcttggagctgtttggctcgttagaggccggcagaaggccagtcgagtggtggttcaacaactaagagactcgctccagtctcgtatcttgcacaacctatccggccggctggtgggggtgctggtatatatacaacaaagacgacaagttggacacttggagatcatgtgatgccgtaacgactatttgccctttttttcttgcaaccgaaaaaacaaaaatcaacagatcattattcgcctcagccattttgggcatttttttagaagggaaaaaaggagcaaaaggattggagacttcggcgggcttgtatcattttcccactctaggcttatgagtgtcggaaagaataaatcagttgtgatactttcaagcttgttgcctccgattctaaaccggaccggagcgtaacacagcagaacaagacctggtcgcgttggggaaaatcacttttgggtttggttttttttattagaaggatacctatatagacttgcttcttctcgtatataccaacttttatctttcgtcttcttttccaaccaatcaacgaccttacgagtcgaggaattatactaacctctttttaactggacgctttccgtgacatggaaaccccagtgtcaacccatctacatgtcaatgagggatagcttctgcgcaatggcgtctgtcgcatcgagactggcaaattctaccatgcagtgagtgtaacactgtctcgttctcgagggttggttatttgtgctaccgaacctaggagacaatttcccgggcacaagaggtcaatgtttctgacaaaaactcaaatgtaataataattcaacagtcgtgaccgaccaatgccccaaggctatgaaaatcgcccacccaatcaacaaaaaatatgtactgtcatcctcacgtatatataccccacccagtccattcaaacctcaccgattcaaactcaacaacgcctcaatatacctcctcgtatcaaccccaatcccctgagccaacttggtcgccccatccgcccaccctcctccccctccaccccctccaccggcactcccactggcaatataagacgtactcacccccctcaaccctcccccgccgtgatcactagcccgccggataagtataatctcctttgtcacaccaacctcccccctctgtccaccctcctcactaccaccgccatcagaggagccatggccatccacccaccctctgatcgtcgccgtgccggtggtgcttgtcgccgtggtgatagtaggcgtcaaactgccgtcggtgctcttgctgctccgttccaggatcctggtccagactatccaccacccccggctggtcttgcacgtccgttcaaactctgacagatcgtctcgcgtgctgctgtacacgttgagaatctggttgtgggtgttgagggactccacacgggtccaagcacctggtttcttaacgccatgcgccgttaccgatactggctcgggaatgttggggatggtggaatggatcgtgagcagcttggggtcccagaccaagtcataaatctgagctgtcgccgcagcaccaccgacgtctggtcgctcgggccggtatgctgtggaggacagcaatggcttgtgtaggggggcaagttgggtgtgtagcgatctgtacatgccgtcccaggccaacgagtcggttcggagctggaataagaatatgtagatgaagggtcggttggcatataccaccacccgtagcttcttggtcttgttacgatcttggctgtcgaattcagtgttggaggtatccgcgggctggccctccttatcagaaacgccttcctcagctagctcagtgttttggctgcccaggtccttggtcatctttgactctggcttatcctcgccctctttctcaagctcgacggtgagggtgcgcaagagagttctcgagttggggtcggctgcatctgctgggtcttgggcgtctggatcgtcctccttactcgttggttcctcgatatcacccataagcccaatgagatagcggccggtgctaagagaaggctgtcgtgatttgggagcctcttccgaagtgggaatctgctgttcgctggcctcagcggctgggacttcttgttccgcagctggagtggtttccgtgatccttttcccagtcagagaccaagatgtcccgtatcccatcttcatgtacccaaaaagtgtatccataccgccctttcctacttcatcggcaccctttgaagattcaccactacttccagaagatgcagcctgttgttgttgttgttgcttgccctccttagcagcagcggcagccttccttccagcagctcttctccttctcgcagcctgtgatcgagtcgcagtagggctgtcgttcactccatatgcattctccccaaacatatacatatcttccatccagaatgtcagggccctcaaggaattcctggacagcgctccagtcccgagaaaaaccgctccatcttccgctccaggttcaattccgttcccaagccacttttcatcttcctcattatcttgctcatcttcagaaggagcctttccatatcttccgacgaccaagtcaaccagcccttctgttctttcgaccaacccttccaatacttccctctccccgctgcccctttcttcctccccaactccgatccccagctctccacaggcagcaatcttgatacccccaaacaccgcgcacgccggatttccgtggagcatcacattccaggtactgagaaacagatcccagtaccgccccaacaccgccacaaacttttgcctctgcgtcttgacaaacaaggccgaaagcgagctagcatgatgcagcaaaaacaccgaatgtgccctcagtaaattctgcaacaacagcgacgtaggcttcacttccctggagctatactccatcttcctttccgcccctgcctccccagtactagcagaaggcagctgcgtaagatcaatcgactatcccgctcatcttgtcagtaacacatttcacctccccatgctcggcaaaaaaaaatagtaaaaaactcacagccaaaatccaccaccccggctccaactcatacaccaccaccctcctcctctccgtctcaatcccctccaccgccttttcccccgcaaaacccctactaaactccaccatcccctgcgccagcccaacctgcctcaacctctcattccttatctcccttgacacctgctgctccatcccaccagtcgaagaccgatgccgtctcctcccctttttcaaactcccaccctgcgacgaggcatgctgctcgttcagcgaggcataatacacaatctggtcattgacactgttctcatcatcgccgccgccgccagaccgcgaagacaagctcgggttgtaaatcgccagaaacccaagctgggccggaatgatggacggtgccgccgccggtggtgagatgatgggaggtggcaggagggaggggggtggtgctgccattattttctctctttctattttggttttcttgaggacccaaaagccggtgcgcggcggtataagttgaaagatgatatataacaaatccccagtctagaaagccagagggagacaaaatggcaggttaggtaagataagttagataccgtcagaggtacttgggatcgctttacccgccgggcctggcctgatgacaagtcagcacctgtcgatgttgacagggcgggtccaaattgaagaaatggcaagttgcgcttcccctcaaaacggagataaatggcaagagcacttgacgagaccctcacaagtgagggatgctaggttaggtacacactgtgcatattgttaggggaacggcgccgaaggagtgtcgtcatagcgagcgccaattggctgacctctatctacactgtggagatccccgcactgtggagaaccgtccacgtattgtatcggcgcgtccgacactaacaaacgatgggagcgttgaccggttcaaaaacggtcaatagcaaaacagaggccaagtcatgatacttgaaattgaattcttgtcatcaaatatgactgactgtacacgctagaagaacatatactcaagtcccctcgcaaaccaaacatgcccgcccacccaagaactccgattcacagcgcctctctcactgacctgagaaccaaaagcgccccttggataccttatccacccttatgcgtaacagaacacctcctacccggcccaaatgcatgttgtgtgtgtgtattgtccacctgccatccatcgaacctgcgatacaaaacccaacaagcacgccgaattaaagcccataaaataaaacaagaaacgaaaaagaacacgaagaaggaaagtacaagaggtcatgacgcgtagaggcatctcggttagtacacctcgttcgggtatcatgcgcacccgacaatgttgaatggaaattacagccgaggtcgtagtgcccccctttgacgatgctgaaaaaaataatcccgaaaagcacaggattgcgtaaataatgacaaaatacaaccgtcggcggcgatggggcggttacgtaaaaaaaagcttggaaaacgccaaactctttagacgtcaatctccatccttgaagcgatgtcctcgctcacaccccgcccgaagtggctgtcgtcggcagccaggtcgaggtcgtcatcgtaatcgtagtcgtcgtcgtcgtcgtagtggtatgagacgtcgccgtcggcatcgcggttccatattaaaccgtcatccatgtcatcgtcactgatttcgatccgctcggcgactctatcgcctagccagaagatggctcgcttgttcgcgccgacagtgtcatcatcctgattgtgggcccacgactgggtgcttccccgcgacaggagggcatgcggtctgacactggggctctggctcatgacaggcacgcctctaacgtggatgtagcagactctcttcaaggccttgttgaagaagaagtagtggaaggcccagatggcaccctcatcgtcctcaaaggggtcattggcgggttggtatgagaagatgctgcactccttcagatccatctcctggtcgatcaacgaccacatctcagggccccaaggtggggatggtgagacgcccgtgtcaaactcggacaccttggaggacagggagtcgtaagcggccattgggtcgaggaagttggtgtttggtcgcacgctgcggagtgtgttgtcaatgtgggtcatgacggagcggaggacattctcgcgcttgaaatcgcccgggcggagaaccttggagaagtcataatcagtgtgcgatgcgttgagggtcgcgataaggtaggcgaaggtgcgccggttcgacacctcgtttagggagccaaagggcgaggagcgctccaggttaagactcgctgccattgaactgcgccgaggtggggaaaggcttgcgtcgaacttgagaagggcggcatgttgtgactcgagggattgggagatattcttgtagagcttcttgtccgaaccggcggccttggtcgtgtaaagatcacagctgccttgtatgtgacaatcgggtgtatcaaagttgagggcgctcgtcactttgtcgaacgctgggagagataggtactgtcgcggcttgtcagctcgctgccctggcatagacggcaactatgatgtcaagtgtccacagcacgcataccttcattttggaagctgatagcggtgggaagcagactttgcaaagtgtgatatcttggggagatgtgctctggaaaaggtagccctatcttgcgggggcatcaagacgggaacgtgtcgtaagatggagatgcggaaggttgccggatggacgcagcgcgtgaccaaccaggcggagtggtgtgaattgtgggtaatgttgacggatctgggatgctgagcagctgtcctgttgttgacgtgatgattcgaaaaactgatgaaaaggccgagaaactgagagatggcttcggaggaagtggtgcgcaatcctgggaatgtcgcagaagactgcctgtgttgtgtgtggtcactgataaagaacaaagagccaagtttcggcgggggtggtgtggtgttagtgagttgccggggacgatgcgatacgatgatgcgatatggctcggcgccagatgctggctgattcgtgatcaaaggcacgtttgagaaacgccttttgcacagttgaaacccagaaagaggggaagtggaatgcaggaaaagaagctggttgctgttttagtcgagtgtctttcagctggcgggctgggccggtgttcgaggtgctgcatcatctggccgctggctctgcccacgttggcttggcctgacctggcccaggtagcgtaatcccggtttcgggcgggcacgggggtaaatgatcggcagtcccaggtcctccaccaccccttcccccttttccgaacccggcactcccgtcatcatgctgtcaaccatgaacgaatgggaaactctcttgtaaccacgggctgaatctgtgaatagcatcaggtataggactcgaaatcacatctcagcatctcccaacaaacccttcaaacacatggtcgcaatgcggatgacagattcaagtagggttggtggagcgccttggtagcgttccaatgttgtagttattagtaagtcgaactgacgtgtgccgggtgcttgctggtctcctcagaatgcattcccgaggatgacctgtgcgttgcatgcagtccttctttgcggaccagcaccgacagacagccaagttatctacacaatgcccatatctaatatctaaggatggagtttgctccctcctcatgggtaaatgtagcctagcccaatgccttcccgctgttgccgcctgccacggcctgccatggtctgcttctttgcagccggtctgttcctgcctatagccatcatcatttccgtgtccgtgctgtatttattgtggtaaccgtcttcgtcgccttcggtttgttggtttgttcgtctttccttcgtcgtcatctagggggtatcatgccgcgtccgccgcctgtttcacaggattcctgcctctttgagagccttctcgagctcttccgaagtctgtgtcgcatgtgtaagccagcgcactcagtcaagtcatgtatgatctttgtgtcgccggtgcacagtttgagggagggacctgctgcccaaagtgggaagggtgggtgaatccgtggagagaaagaggtgcaagtgatgatgccgatcctctacatgatcttggtgacctcatcctcgacctgaggggatagggttgacgtgtcagtaagatcaccagacttggccgcaataagggactcgcgtggaatgccgtgatgaggaaaagaaaggggaggcatctctgccaagcagtcaacgagtggtgggggaaagaaaccaacctccatgtcctcaagggcatcctgctgggagatgcatcgcaacacattcttcttgctgctttcctgcagttctcccgccagcaatagctcgtcaaggatgtaataggctttggtgaaagagaagataatatctagctcgcacacattgccgtagtacttgtccatctgctcaacatatcggtggatgatttcgagcgtgatcagctcgttgtcttcggaggagcagccggcgatgaagaagagggaggcatatcggcgatagacaattttggtatctgttgatcatgcggtcagtatgctgccgaaaaagatatcaccactggcattctccaaagtaggcatgacacacccttgtactccagaaagttgcacatccgggttcgtctggcaagaacaagctgtgaaacgtccttgacaatcttggctttgtcctttggggacaaggtggtgaaccacttggccaggcgctacagctgaggttaggatagatgttcgttgaagcgaccgtgatgttggagacaatgagaactgaccactttgccctggcgcgaaaggaggatgagatagctgcaaacacggtaattagcgcaaagagcctggatggcagcactgcaggataaactgcctacttgatggccatgatgaagctattcaggcttcaccgactggcaggaagttgtgtaggtctgagggaggagtgggtgttgtcaggatggtcttggggaaagtcggttggcatgcttccatgaacaaagtctccttgctccaaccatctggaaggtcggccacgactggacgctcggcctggggaaatttggcgccttcccaatcgccgatgatgagtgcctgaggaacaaacttgcagcgcttggaccccaatttggcggggcaatccctgggcagaggagcttgggcagatcgcccactggacatctcgaacgcctcacaagtgggatcgatggtgggcgtggtggggtagtatacccgactttccgtcaaggtgttgttgttccgtcgtcaccgtccttcgccttcatggtctgtgaaaccctttcaacaactcattagaactccaagtctcggctcactgaataagatatctcttcacccagccagtgctcctcgggtgcactgtgcagcttcggcttacagcgggtcagacaacctaggagcagcagagtctcagtggaaacaacttccttattcatcgctccttgtctgggatttgaaagcgtgggtagagttcctgaagggacggcctgggtatggcatgtgggaggttctaggtccctccccacgctccgcgacagagtccgttgatgaggtgggacgggctttcatcccacgctctcaaatcacaaggtcaatattgaacagtctgctcccatcattactactccctgttgaagctggttcgatttccgctttgggtacatcaatccggctctacgagagaggtacatatactagacctctcccagtccttcagggtatactttcctatataatcacgcctcatgaatattcaaccgtttattactccccagcgtacattctcacatcaccaacacacatattgacgaagcaagctggcggggctcctgttgttctgacatgaatcattaataattcattggaaccccaccaagagagaacgcctgctgcgctcgcgctgtgccatcctcgaaatctccaacctttgctcttctctctatgcgatttctaaaactgctctacttgctcctggtggacaccggacaatcaatttggttattcctgcccggaagaaagaaacgacttgggggaaagcgaaccatggcaaagctgatactctctaccgggtaacactcgacctcctcatttctccccgtcccatccctcccccttcccttcccttgccgcgctggcgctgtgactgtgtcgcatgagagtggctgctgattgcgtgatttggcatctatctaggaacatcgtctcgggcggcccctccatcatccgcaagccgggcgcatatcgatccaaccttgaactcaccaattcgctccgaagcaacttcctggccgcacaggaggattacgctaccgccgccgccgacgacgaagcccaggacgggaagctacatgctaacggcggagtcgaaaatggcgcagcgaagagcaatggcaatgcgctgcacgtaaacacagagacgggcggacgccctccagtatcggtctggactgccgaagaggatggcgccctgtatgtaccccgcatcgattggtcagaggcgggcctgcaggaagagccgtcgcaatacagcatcacggtcaagctctttttcttgccgtctgcctctgtcgaaaggcgggcgcagtttgcaaaggaggcgctggacttggtgctgaaggagctggatgcgccagctatcgacctgctgattgtatccttccccggcatgtcctttgagggcgactgcgaatgggaagccgacagacacaacgcggttcagggcaacgacgagcaggagctcgcaacttgggcggcgattgaggacttgcacagagctggactggccaagagcatcggcctggccgagtttggcagcgagaagctcgctcgcttcctccagagggtacaagtccggccgtcggtcaaccagattaatatcaagaactgctgcaatgtaccaccaccactcacgaagttggccaaggaggaaggtatcgagctgctggcgcatagcgactgcatcgacattcttcccgagggaacactgagggagctgctcggccaggggctcggtggagctggtatactcgctgatccagagacgggagccggtggactgaagggagatttagcaccgcaatgggttgccaaatacacagccgtggtgcgggaccggggggtgattgagaataaggggtactttgccggtgctgagctgacagaaggttgagaccggaagtaatctagaaatattctgggatttacatatgggtggttatctgctcttttttgggtactggatcagacatgatatcaagcggagtgtatgtatgttacgaccaagatgcatgtagcgagcaacgctgtttttgtttctgttttttcgttgtggtccttgtattatccaagcatactcctcttcctcccgcgcatcctgacatcttcgagcttgtgaagcacccccggcgccttcttgaaggctcccctatacgagtccaagatgtggtgaaataacctctccgccctgggatgtgtactcgcgaacgctctctccaacacgtagagatctaccgcccggtcctcgtccgactgactctgcattgcgagcccaaagtcaatcaccaccacatcgcccgctacagcctttgccttctcagccttgtccccgtgcccgtttggtagtctgtcgtctgcccatggtctcagcatcatgttgctcgtcgtcagatctccgtgtaccacgcccgtcctgtgaagcgccccgacggcgactccaatcctcttcataagatcaatcaggggcgtctcgtcttcctggctgtgatccacaacggcatcgtcctctggccgctcccctagccatttgttgattcctactctgaccggctctccctcgatccactcaatcatcatccagccggcagcggcatctttggcgagaacagctggtactgggacgccctcacggtagcagcggtcgaggactttggcttcggaggagatgcgggctttggtgaggcgggcgtcgagaatggggtggcggtagggttttggcgggcggtacttgagggcgcagaactggtctggttggaagggggagggcgttttgtagagacggccttcggcaccttgagtgatgaggatgggcttgtgggcaggggagagggtgaggatttttggtggtgggaattcggttgctggttctgtcatggtgggcgaatctgctttcttttgtctggcggaaatctcgaggttcttgtcgtcggcgagtgtgagtttgttgggacagatatcctgttcaatattttggcggtcgcatttgtttcctcggacgttgaagaggggcagttgaagaaagtgggatggatcatggaggggcagaaatgttacccacttgatctgcccgcccacgcggagctatgtaatgctgtggaatgggctatgcccgatgcaaggggaagacttggtgtctgtaacgtttaaaagaccgtttatctctctcttcttcttttgtctttaccaaacttctccagaccttgtcccacatacgcttagtggcttcggaaggcatccaagacctacgattgtttgtcctctcgagtcggcaagcccttccgatgtgaagcactctcttgataaacttcagcacgacctgatccaccacacttcgaactcccatcctttcaaagatcagaggacatctatcatcatcagcgaggactgcgaatatgaagcatcaaccgaggaaccgccaacagcatcgcggggttctcaagcggcagaatgtgatgacgctcggcggctcgcacccctgtcggtgcgggcggtgaggtcaccacctctcacagccagaaagcaggaaacatgtgcctggtccagggttcgggtcgttcggtggtggtgagcgggggacaatcaagtgacgttccagcagccactgtctttgcaatcacacaccaacgagtgaaaaaagcccagccatctttcttcctggcttctgatggttcgaaagacgccaacaatgtcatgtcgttcacctaccatgccctgagaaattaaggaagcagcgcagtaatccaggcacacgcaccactactggcaaaatgacagcggttgccaacacatcagcgggcctcggcggggacagctatgcccaacagtggatcctcatgctggcccttactaccctcgtcctctcgctggccatcctatcgcagtttgcaacctgctatgcaagagcctacattgatgcgcccagcgaggtgtctgcttttctggatgccatcgatagctctatcgccgagaacgagtcctacgaccatgatatcgccaaggtgaagcggtttgacgataagctgcggctggggaagttgttgcgcgacattcagaaagcaggggacgtgctgagagaggcgcttaatgcgttgatggaagaaagggagggcgagaagagggcagcccaactacggaccggcgcgagattactatgggctagtcaccgacaagagttggaggataaagtgcgccggatggatctgttgaggatgcggtttctggtcgtgcacatggggattatctccagtatggcaagtgacatggcggcaatggcgagcaggacgaatggaatggctatcaatgcgagcaccagacgagagtcgtcacagaggccactgccgccggcaagcccacctttgacacctgagccaccacccttaccaccaccgctacgcgcgtttacagattcgcccatcaagtccaagccacctttgaggaggctaacggtacattcgatgggccatccagaagcaatagaggtgccgcatcgaacggggtgggcaggtgtaatgcaagagcttcagagaagcccggtattgagagagaggcacgccagcatcgagcttgccatgtctcgagcggtttgttgacgaactgttatgaatacatacgacatcttgacgattatgatcattacgacctttatgacattccagcattcggcgttcgcgtcagccagcttcattcaaaaatggaagaatggtggaatagatctatagcgatgttgatgggtgctggcaggattggtttggcagttgtttgtctggtgtactttgacgagataccctttttagtccctttttccggttgttcgagcaacaaagcacatgttccgttatatgtcatgcgggcatcatataggttcgacattctggttgatctgtcttcactttgaactcttcagtacttgtataatcaccattccattggtggctttagatgtatacaggtctcttgagatgtaattgtacaatcacacttatacacaactgcatcgtccttctagtgagcagcatcgggacctgttccgtttctttcgccaactgttttgtttttgtcagcataaccgccacccagctggaaaatggagcgaaaacctaccatcaagagcaaccaagaaccgactgacacagttgtagcacgcaacctgttatgttgttagctgttttgttgcattgttgtttctcaggtaaaaaacaaagcttacagtagcagtgatctcaaccatctccttgtcgctgaagatctccctcatcttggcaaacgtctcatccctcacctgaacgtttcttgtcatctcatccgtatagcaagtaacagcccactgcttgtccgtaagctcggcatgcttctgggtctcacccaaaacgagaggctgctcagtcttgatggcgttcatgccctccttgctcacaccaccctgctcggcgaggggagcatggtgagcccactcataccaggcccggttgacaacggcaacgcgggagatggcaatctcacgaaggtcctgagggatggtggtcttggtgcggaccgcgccgaggaaggagttccagccgtcagcaaccgggggtgaatgaaggagggtgagatccaagggttgaaggggacgggggtggcggcgggtctggatgcgctggacgatctcagcctcctctggggtggccgttgggggtgggtcggcgatgtaggggagacgcattttgcgagtttgatattggggataggggatatcttgtttacctaagagtcagtacttgtataaacatatgaagctcgagtcattctcatcttgtgatgagagacagcaggtagcacttacaacaacgggagttgcctaatcgaggtctgagacaaggcctgagaatggaggttaccttcatgtgagctcacctttgagaggaaaagagaaagatcaacagtgattcagacaatgtggacaagggcccggcaacggcaactgatgtcatccccacattgccggttccgcagcgggtgacggcgggacagagcggaggtttagtgcgggggtatccaccccctttgctgtagcgggaccatgttcggtaagtatttatttacttcggcttcaactcttttctaaatcttgacatggaaatacatgagacaccggatgaccagattatatagggctttcttgccacgatgctgttcacaaggactcagaagcgattcgaagcttgatttcctaggtacacattcatttctcttgtgaagtactgttcgtggcccatcttcccagtgagcttcaaatgacagtctttgttactgtgtgtcacaaggggaacttacacatatgattccgcttgaaattggaataacttccgcttcaccaccacaccttttgcaaagtttgtggaaaagaggcctctctgcctggtaacttttctaagcacaaactacttcgatagccatttctatattcaacacttctccttgatagcttggtcttttatcttgaacaaatttgaaaacagtgattaaaggacaatgtccacaaaagagatatgaatgacttggtatatacataattaactgacacacacgcattactcgcatgccaatgacattagatctcaagcttgcatcgatggggtctcaaatggtcgttgaagccggcatgcgcttgcagttactcaccgggccgtgggcatttcctttgaactggaaatggaagtggctcccaagtcactggggagcatgaacaggaaggtcatttccaagatcagctgtaccggcgtcaaataccccccgagacccgcctcctgggtaggcaagcgcagagaagctccttctctggtatgtgacagactcagcaaagtgatgctctggtgttcccaaaccttctctcctctcctctcttccaccaattcatcacagagcgaagttgggatttccagccctacatagccaacttgcccactcccggcctcctctcttcttttttgggtacattgtgacatattgtctttaccggcatccttcatcaatctggccttgccttgttccaccttgtgaacaccacctgagcgtttttttgggagcgagcgagcgatcgaaatcaaatcacaactgcatgaatcatcttggacgaccgagcactacaattgccaatataaagaggctcgataccttacctccccatcttctttgccgtctctattgtgttttggactggtctctcggcacgtaatattcccgtctgatacctgggtgcctgggctgcgtaaaattggctgcgagttgtcttaagagaagactgaggagctttgcactggagggaggcatttcaaagccaagaccactcttcaaactgctattattggctcaattttacaatcgacgacatcatcagcttggtttccggggccaagggcaggatagctctcgccattttggtcacatcttgctgtcaacacaggaccaatttcctggcggctgggaaaacccctcgtctcccttcctaggcaactgtcttttcaacctgaccacaagcaggaacaatttctttgtctctcctcaactagcaagcttcctggcaagttcgtcaaccatctagcttggaacaacttcaacgatctcgcctcagtacaacttggtgtgaggcttctgaaacgttcaactggctggccatcttctggttgaccatactctgtaagtcttctcatacttggtgctccccattctccaatgaatcaggcctttcagttgatgattcactgggggttgatcctcttttggcgaggatattgagagatgatccgaggattgagtccatctggggatatctgcaacaacgtcagctaaccaaggattgaaacagtctactgccgtcactcattcctctcgattttaatcttggtcctccgatcggacttcccaacatcaacatgcttcttccacgccactcaagcaaaatccagcctcatggctcccaggccaccactaggccaagtcggctgagatctcctggtcttcggctcaagacaagttcgctcgatcttattccttcagatgagaaggcccaggcgatggcttcagccgactggagaaagatggcgccggattctggcctcggcgataatcgtcagcagatttcagacgagaatagcagacatccatccgaccagaatgatggcttttactcgccctttgtgctggggatgaagcctatgaatactggatcaagggctcagtaccagtatgctagggaccctacaagcggcattgcttgggaggtcatttcatcggctcctgggtgcgatttcaggcgggaggaaacgagaaccagcgagtcgtcaggcataccgtcctcaatcctcaaggcgtgccaaccgaacctccaaaacaccacgatggtgcggcttaaggccatcaagccaatgaacgtgagcatcaacggcgacatcatcaaactgcccaacaagtactctttggatgttacccctgttgacatccaagagccagacgctgcttgctttatgaacagggaacacggcgagatcctggccactctcaagctcctcaagcccaaggcccgcttacgccgtatgaagtccgagcttcacgaagagagcgttctgaaagatctggatgacttcttgtcccaacagagtgggaagcctccaaaggtcgtcgcggcaagcaaggaagctcaacgccaaaaccgtaggtcatcggggcattggagcagccatgactctggaatctcaaccagttctgaaacctctggccttcagaaagagatgcctttaggggcacatcaccgaacacctgcggaaggtcaccgctttcagacactactcagccgcctacacttgaccacggagacaagagaagcttcccagccgccgacagcacctgatcatgctgagacgtcgaagagccatgctcaggtggtggatcctgcaattatcgccgcaaaggtcaaagacgaagagcgcgaggagacgcccgacaactcggaaaggggcgcgcgcgaaggtacctttttcggaagggattctaccttgctgtttgggaagggtaaatgggcgcaaaaatcacacgattctggctattcaacattccatttcatgaagcagggcacacaagaaccaacaaggcccaaggcggtcgagcattttggtcctacggttcagaagcgcaaagaagattcaacatcatgttcaaccacctcaaccaagttgaatcccacagctgccgaattcaagtcggtcaccaaaggtgacctcaagtcaggggtgaagagcgatttcaagcccgcgcctgcagcttatcctgcccctccctggactccaaaaagacggacacggcctttactcaacaatatctttcctggtgtactggaagatcccggtttcatggcccagacagtgccatttgtggcaaacgattgtcttcaaggtagtccatggcagacaagtggtcctccaacagggccagtgtgggtggctgaaccgggacagcctatcccagagatggccttccaaccaccagtagcaccaatagcaatggcacctcttcccattgttgatccagttacgcagcagttggtcccaccacccttcgctcctccgcccagcaactttggaaccttcccgccttccggaatcgctcctattgccagccagatgccaggtcccaaccccgtatttagcacgcttcctccattgcggcctcccccagcccccagaccaagattttctcagcctatcccgattcctcctgggcaaagagcccctatgcccgccgtgccgaatgcaactagcttccaagcacctactctatacggtccaactcttgttgccggtccaccgcctcctttggcctaggatggcaagggaccacgaccggtatttcccgtcacccagaaaccacgagaccatgaccctgtgaagcagcaggcatatgaatcgtatctggagtggcgaaaggccaatgagcctggctatcacatgaagtgcaaaatgcgtcaagcacaccgtgtggttcgtcaataccagcaacaggcgcagactgctgactggaagaccgtagctgggcaggccaaagcagcagctggagcgttggaagcacatgcagccgaggaaaagaggaggtcaaaagaagcagctctcaaggagcaattcaaaatgagtgtgaagagggtagcagagtcctctggagccacggagataaaggaacaaacacttccggacacgaataatgaaaagcaaacacaaacattggtcatataaagcacacgatgacgaaaagagggatatgcccgtttgctccggaatacgattcttgtcatttcgaaagctcgctcgctcaggacaattcttttcaacagttagcaaccttcgtttccgttccccatcttattatattgacttcgatcatctcagctcagcaaacagacatagctacgatccttctttttcagcatgaacccggtgttctatagacaaggaatgagttattttaccgtttgctttggagaatcagaggtagctttaccgggggagcttcaggaaatcatgttatccattgaatggttatggactttatgtcctgatggcgcaatttgctttttctttttcgtttcggtttgacttatccagctacatcagcagaggaatcaaacatggatagtacgtgactcgggaggttggctaggtattccgcttgaccgagagttatacagcacaacagagtttaatattggtagtttggttgtgccagcagtggtgattatgtgacgggtgtaacacgatgaccttgtcattcgccatcagccggacccgagaaataagccccctcccagccaccacagtcttccaatttggctccttgtctcgctctgttgatcctctcttccgtgatcttgaattcctcgggaagtcttgcatgtccttgtcctgattctggcaaacccagcatctgggccgccacagctctggcagagagagcagcagatggcatgccatgcccggtgtacccagcacacacccatattcccctgtgggagggaacctctcccacccaggcattagagtcacgagagtaacccatcacgcccgtccactcgtatgttgcgggtaactcttcgtcttttccacccaagtccagcggaggagagaggttcgacctcagatagtgagccactttcagctcgagctcatcatcgttgtattgtcccagtccgagccgcagtgccaaccgacgacctccaccgtagatcatctcgcctcctgagtcgggggtcaacactggtctctgaacgagatagtcgtctctcggtgcgtgttggcccttctcggggtcggcggcgaagaggtaggagtgggtgagggtttggactggggatggggggacgatggcgcttatctggccgcggacggggacgatgaggtcggagaaggaggggaggaggtgggaggtgtacccgtttgttgctaggaggacttttggggtggtgagggtgccgcggggggtgaggatttggtgtttaccgggggaggtgggggagggggagagggagaggacgggggtgttggtttggaggttgaagtttgggttggggaggagggaggtgaggatgtgggcgattagtttgtagggccagagggaggcggcggttttttggatgatggcgccgtggcagttgggggctctgaggcgggctagtttggatgggttggttgggaggattacttctagctgggaggcgagaaaggggtgggttttggtgagggagtcgatttgagcaacagcagtttggaagaggggggttgacatgaaggcgtggacgccgccggagagggttatcctgtggtgatggggttagtttggggggaaatattggtaagagatatgagaagggatataccagtcacagtcgatgttttcatcccttactaatctttcaagaaaagaaaaggtttccaactcaaaagcagcaacggctgggtgggtgccatagacgagaggctggcagtggcctccattctgatggaactgttagaattatcatgtaaaactcatcagataagtcagtccaggcacacacccttcctgtggcaccaccacaggcctccctcgcctcgagcatcacaaccttcttgttacaggaataatcctgcagaagagacctcgcggcaaaggcaccggttataccactcccgataatcacaatgtctgcttcctctggcagatctggtgttgatcgatgtcccaaaagcagggtattcggttcacgaagccagtaagaagaggtcgggttggcagagggaaggcctgcctggttcgttctggggccggtgtcggaggccatcttgactggtcaatgttgctgtttgttaaggttgttgaaccgcctccagctaatataactcgtatcagaaagccgtgttgagatgagactacgcgaatatgaaatccctcatcccaaatgttcagatgagactgagacggagactgaaagctaatgcactgacggcatgacatgacatacagcagaggttctccacttttccaacccctttccaattggagtctattagtcaagatggtaccttgtattgagcaacagctaatcgctgcgacatgtagcaatataacaacaataacaagacacccatataaagctcctggatatgcattcatcaactcagtctacaccacctgagatatcccgcctgcccgctgacgctctagcgtagtacaatacgcggaggttccgcccatccaaagggtcttccatcttcattacaaaatcaatgcagtctactcctccctgggtataacaacctttatcttcttcaatttgctctgaaatgcctatggattcagctggacgtagttgcctaacgacacaatagggttagctgcgaacactcaagtcggtccttggatggacatagaaacgtaccaggaaattgcccttgcttcccatgaaccttgccggtccaccattcattctcattattggttcttgatacaatctcaatcacgtcgcccgcccggaaactgagatcgccctcagcctgcgccgaataatcgtagagtgccgttaccgtttccaccttggccaccgaggcgccggcaagattctttggcttgggcttgggcggtgggggcttcgacttggctgcggcggccagcgacattgggcttttttgcgctggcgaaatcatggcaggagagacgggagcagaagaatatggagggggtggttgttcgccaccgtcattttcctgagatcgccatgttggccgtagagaggatactgcaggcgctttggttgcggaggcttcaccatttgtcgccgcataagggaagggcgaaggcgagggcgcagatgtcgaggctgaagctgatggtcctgctgtgagcaagcccgctgctgctggctttgccgcgatggctggtcgcggaggcccatacttgggtggccgcctttgaccagtcgtcttgaacttgacaatagagagtgcctcagctcgctcttggacgtcgccgcgtttcgcaaggaaagcctcctcgacgtccagtgtcaagtcgaagtatcctatgtcgacacgctgcatgcgttcgtggagagtgtaaaagatgttgagctgcatgtagtagaaagactggaacagaggctggatgaaatcgcgctcgagcgcaaagagcttggggagctcgtctttgagcagatcgttgaagtagttaaattcctgtgtcgactgctcgacgtcattctcagccttccacatggccttctcgtccttggccgacctttccttcttttcctggagcttcttgagggtggtgcggtgtcggtcgtagtccaacttcttgtgctcgcgcttggttgctgtttttcgaatggccttgatcacatccatgagttcctgcgccggtctgacaacccgcgtgtcaatcatctccagctcgggggccagagtctcctgcaagtcccgtacaacggcctcatactcctcgcacgcccggatgccgtccaagttctcttgcgcaatcaacgagtcaggatccgacatgcggccactaatgggcttgtagatctcggtcattgctttggaaaactcgatctggtggttgagcatgccgttgatggcctcgaagtactttttgctttcatcgtggaggttcttggtctcggcctcaagttcttggaatcgtcgttcggcatcgatatagacggggtctttggtgttctcgccgacattgaactttgccttgaactgttggggggcctaaagcaacacagaaacacaagagtcagcatcatactccccctcctccttcatcaccacaagagctctcctcgaggaaacacggatgctgcggggcagaacctactcgaataaggcccttctggaaacccctgaaactcattcttagttactgctgaattgttgtctcgttcgataaggtctgatcggggctaagagtgctgctagaagcaatacggagcgtcgccggcggtgtgagagttgagaatgggaagagtaagcttggcggctgtgtcgacaaaggttggttgtggttgatgatggctctcgggagacggatgatgacgatggcccgggggctcagcgggcgtcactccagctccttggcagatgaaatccaatgaaagacgggccaagtgggcgctgcaacggcaccgaaacccgatttcaagcctctcgccaagccaaggatgccctaatttgttttgtcactgcccgccggggattacggtcaggattatgtattagtgggcccggtggtgatacccaaaagaaaatgatatcagatagtttattggaggccttcagttcgagataggtagctgcactatgtacgcagtagaggtgtcaaagggacagacagaaccggcagcgcagctaagagacacctgccccacccggcatgcggttcttctgcgaccttcgtcattcctgaaaacgttctcagcttcgtcatgcgccaccgccgtgaccggcagaatgcggggcagcgccgtgcaacagccacagagcgaacaaagcgtggggaaaggtcttcgctgattggccacttgattatcattcgaaaagactgccgcccagcatttgggttatccatggggcatggagaatgcgcaaaatcggagctccgtcccgcccaccgagaaggaaacttttcttcccctacatctcgcacaacttttttttctcgtaccatggcaactcttgcaccatcagccatcagacaggcatctcgcttggcatccaagtcggccctcactgctgcaccccgtcatggcctccagcagctatcacgagtagcatccgcgcctgtccagcgcactgctggcaagaagaggagctatgtgaccgagtcgaagcgggataacgcccaggtccaaaccgaaaccgccatccgtctcgacaggaaggagctggagaaatccggactcaccatcacctccgagaatggctcgaccgagcatgtcagcccaatggctggtaggtcttttcccattacgactcgatatctcggctctagcatgctaactccgagctcgcagatgtcctgaaggcggcgaccataatggatgaaggccaacggcccatctatatggatatgcaggccacaactccactggacccccgcgtgcttgatgccatgatgccctactacacaggcttttatggcaacccacattccaggacgcacgcgtacggatgggagagcgagaaggcggtcgaagatgcgagacaacatattgccagccttatcggggccgatcccaaggaaatcattttcaccagcggagccacggaaagcaacaatatgagcatcaagggtgtcgccagatttttcggcaggtccggcaagaagaagcacatcattaccagtcagaccgagcacaagtgtgtgcttgatagctgcaggcatctccaagacgaagggtttgaggtgacatatcttcccgtcgagtccagcggtctcatcaaccttgacaaactgaaggccgccatccgccccgacacaatgcttgtcagcatcatgtcggtaaacaacgagatcggtgtcattcaacccatcgaggagattggcaagatttgccgggccaacaaggtcttcttccacacagatgctgctcaagcagtgggcaagattcctctggatgtcaacgcgatgaacattgatctgatgtccatctcttcccacaagatctacggccccaagggaattggagcttgctatgtccgccggcggccgagagtgagaattgaccccatcatcagcggtggtggccaggagagaggtcttcgtagcggcacgctggctcccgcccttgttgttgggtttggtgaggcgtgccgcatcgcaaaggaagaaatgaaggtatgtctcaactttttccatggttcgcgttacacatacacatcccctggtttcacctgatgatctgctcatacatgcatggctttctgaagtccgtgacaagactgtactgttgagagacagcgccttttctgattgaaaccttcccttctttctcttttgacacaaccgaatattttgcttaggtggagctaacaggcaaaacagtatgattcgcagagaatcaagttcctttccgaccggttactcaacggtctcctgtcgatggaacacacgagccagaacggtgacccgaaccacttttatcccggctgcgtcaatgtctcgttcgcctatgtcgagggtgaatccctgcttatggcgctcaaggacattgccttgtcttcgggcagtgcctgcacctcggcatcgctggagcccagctacgtattacgagccctgggcaacagcgacgagagtgcgcactccagtatccggttcggtatcggccggttcaccacggagcaagagatcgattacgtcctgaaggcggtgacagagcgtgtgggcttccttcgcgagctgagtcctctgtgggagcttgtccaggagggtgtcgacctcaacacgattgagtggagtcagcactaagcatggagcggctgttttcttgcgttggaaattgttcatttgggcgggctgggagtgtaaaagcaacagcagccaccacaacacctgtataatacgtgtatctacctactgcgcagaatgataccatggggagctaacagcaccctcacgatgaaatgactccctattactggtcccgagttgagcttgactttgctgcgttcccctttgctgcgacttgtgttttgactgggcgatctccccctgctattcggtcctttgagacttgatcgctgacccaaggcgtcgaatgaccagatttctcacaggacagacttgacgacatgaacatgtatcgtcgtatatgggatggaagttggctgcttaatatccgaccttatcttctttgtgtgttctcgcccccgtcgagatggttctagattgtagtcactctcggacgcccgtagtttgttcaaattagaagcacgactggtcgcgattgctggatagcctgggagtggggtggcgttgacatggtctcgatgatgttgaatgctcattgcgaaacatttgggtggtggtagtgttgttgttttacggggggcggaacgtgtgtggctcagactggacgtcctttgtggctaatccacgtagtggtcaggcgttgtatgtatagagctggcgtataaaattgtaaagttatcgtggacggcaaagaaggcatgcagggtaggttgctggtgtgccgagccagatggttgccagaaaatcctactacgaattgtgtaaatgcaggtcagccttgggagtgatttggctaggtgcagttactgtgtacacgccgctatcgtacagtatgcatcggagagaactgcactcataccctcagctgggcccgtatactgggtttcacagggaagaagtgagcctgaggattatgggatcggggtggtgttgggtggctgttacggggcgagtgtggagatgcagggcatatggaatagacagcttttaggaagattgatgattgagtgtgattttgcgtcgtgttctcacgccagtgtggttaccgggaggccgggatgaaccggatatagggactgggcatatattctttacgatgtgtgatttgcttagttccgccgtgtcgggtcgatctgaggggcgctgctcgggaacggtagccatttgtgaggtttcgagatgaacaactttcctctgggtacggattcaagaagaaatcaaactatattcccggcaggaggcctgttcgtgttgatcagcgcgtgaggtgaaattcagcctttttttcgtctttatggtggagagctggaaaccatgttaaatctatgggccgattggtaagacaccatggggtttctatcggtaaagtacttttgtaattgtatagccagactgctcgaagtagtggatacctgaattgacagataaattgtagatggccagctcctcaacacccactgtgcttcactgatgtcatgaagttgggctaaaatcgtgtacctatcctacaacatactttcatatgctggcaacaacggcaaactgagagaatgcggtagatgcatgcacaatcaattggaaccatgtgaggatgagagcattagtacagtctcatttctgattcaggagcttctgagccgcgagacagatctgatagggctgaggctggtaggtgcgcaggggtctacgggcgcgctaacgaacaggcggggtgcgcgctatgatgtcaccgcccatcccatgacccctatgacatcactcgcaacctgaaacaccaagaacaacatcgtggacggcggaaggaactgctcagagaaaggcaatgacgtgaagctaccagtagcttcggacctggctttgttcttgacgtctgcaaaatataagacaggctttttctcaccaacaactcttctctctccatcaaccaaacaccttgaacagcaatcaatacctttgaagacaaacaacactctcaacttcaactatttccatcgcaaatatcaaacaacatgtctaccgataacacttccactctcaagtcctacgtcgactccgctaccggagccgtccagaacgctgtcggttccatcattggcagcaacggcgatcaggtcgaaggacaagccaagaaggagaaggctcaggctgagtacgatgcctcgcatgccacagccaaactccccggcttcacagcttcttcgtccggcgccgtgaccaaggaccatcccgatcgcaatgccggttcatacaaccagactgccggtgctgctaaggagtttgtcggaggagtgctcggcaatgaggtatgttcctaaaataaaggttgtctcgctcgtcactatgaaggggtgctaatcagtgtctgcagagccttaagcagtccggccgcgagcagaaccttcaaggtcaagagcaagaagccaagggccaaatcaacgactacgtttccggtgccgccgatcgtgctgctggaaccctcggcagcggtattgccggcctgacgggtgaccgggtcaagcaagctgaataccaggaccagcacgacaccggcaagactcagcaacgcggagccgaacacgacattgtcaagcaggcagaggcgaagcagtaaatcatgatttggggagaagcaggcgttttcattgcatggaattcggaaatagcatgaaccggttgatgataccctaggagagtgaaccggatgttagtagtgcaaggctctacattacctagtttagtttgttttttttgagatgttgaatgcaggtggcatttcctaaattttctgatttggcagaccctcgtgattgttgctatttttgttgctttcccaaagacatgttgtgcctggcgcgaggtagagatctccgatctggaaacctttcaagttggggaacacccaagagccaagagttcttcccgcatgtgaagttgctgcattgccgcaaagtacccgaaattgtgtgcttgtcgtgtgctcaaatttcaggcagtaaaatcatcaaggaccatgaacagcctccttgcgaggcagcttcatttcaagcgagtctagggtcctatgctttcccattgtgtctgaggactctttccacaccaaagaacaggtgaggaattgagccaggaacgagttaccctggtgtcaatgcttttcagctggaccagtcaggaaggtcacaaagagaccatcgcaaagttcaagagttccaacttgggtaacctgcatcattggaagtttagttatcttcattggcctaaacataacggcctatcgagaaggctggagatttgtgagaacctgatccagtcagctttccaagcatattgttcactacaccggaggaagaaatgacgatacttcggtgaagttttagtggagcatcaccgggcacccccatatttttggtgtccgtcccccccacgttcccaagcagcacggaccgtatcttctgcgcatcgtgggaggtatcccatattgagattgtccattttgactggctatggatttccgccgcttacattacaaaccggaccgttaggtatgttttttggccggcaacgacgatttgtcaaccgcattggatgctagtcatgcgtatagaagacgcagctttgctgggctaggtaccaggtagtgcctcaggcccaagaacaaggcccagaggcaaggctttatccacaagggaaacagtgctggctgcgaaaattggcccccaaagtctgcctaacctttggtgagtgccaatctccaggtcttttgccgtgggtaggtacctgtacagtgttctaaaaaaggatacattctgcagcggccttcttctagccttcggttcttgattgaagctgtggtggaggttgttgttcgctgtcttccttgcagtgtgcgtcgcgttgctgccattttgggcaattaaagctgggcttggcatgaaatgctcatttgattggtccagctggtttgtctcttggtacttttcaacatcaagtgctccgacacccttctcgattgcgctttccactcaagcagtaggtatcttttctggagcaaggaggcagcgcaatgctcgtaggaaccacgattcaatttggaacctctcttgctcatcgattttactaggtccggtttcttctacaccacgacctaggcttggttcatgtgcctcaaacggaccagtagacacattcatatggacctattgggatggccagtcgctacagagatgtctacaaatgccaggttcttgcaccacattttggtcctcgattcagatgagccgattccttcccttcatcctctcccgcaggcccgatgccgtgtgaacatatgctgactgcctcgcctagccgtgaacaagcccctttgctgccgtttcgctacgttgtacggttcctggcgacccatttcaagacctcccatcgacctggctgttcacaaacgatttgctcggctgtccaggattttttttcgaagcttatctcattgtactcgtctcaatgggagtcaagaccatcatttcttgaaatcactctgttctccgcaccatggcccccaacccttccaaatctctttggaagctgcctgcaccagttccactgggaacgactaactatgatccagctatcgaatcagaaaccaggacgctagtatccagctttccgaatttcaggtattttctcatttaccagtcaggcgttgcctcccacatcaccctgcctctcaccgccctccaataccacacaaggtgtggtgtcaatccgtatatgtaagcttgctcagtgatcaactgcttgctattttcacccccttgcgtataccctctcatggtcccgaacctatggcttcacggtgtaatgtcgagatggtgggttacatggggctcggaagcaaatagtcgggactacaaatccatatccgcctacctccaattccttactccccctgaaaggggttgtggtgcctcatgcttgcttctgggttatgcaaagaacctaagccgcattcaactcacgaagcgcaaagtgtgtttcctggttgccttgctctgggtacctctttatggctatccgttcgggtgttctgttttggcaaccactggtgatggggtcaagatttacaactgcgaccattacaccatcaatatctggacttgaggctgagtcattgggtatcgtcactgagtggtgaccgaactcgtagctacatgtcttcagataagttatatactcttagtctgtcctgcccttccggtagaagatctgtctttgcatcaccagcagcatcagcgacatacccacctgcatatcaagcaacataacacaacccggttacaatcgagtctacatccacgacgtccttgtgctctagccatgaagaacagatctagccaacagcccgcaactatgagagtggccatcgccggagctggcggctttgcccgtattctcgcccagtacattagccaaacccactctgttctcattctttcaactcaggtcagtccaatgtcgtgtgtggtgtttcagatcttttcagctaacatatcagcagccccggcccgaggtggatgaacaatgccctggttgtcagcttgtcgttgtggactatcaagatatcgagaatcttcggtacgccgttctgggagccgatattatcatttcgaccatctcgggcgccgagcagctcaatctcattgatgctgctcgtcgtgctcgggttcgtcgtttcgtcccttctgaattcgagggcgacatgtcacgccgaccgactgacgacccgctggaccgtggcggacaatccgccattgagatgctggaacagctccacatacgatacactattttctcctgtggcatcttcatggaacgctttgccccaggaggcttgcagacctatcacatcggggcaggatcgggagttcaggggccaagtgactaccttgttgatattcaaggctgcaacgctgagattatccccaacaacccaagtggccggtcagtccgtgttacgctcacatcggtatacgacgtggcccaatttgtcacggcagccatcgatctcggcatcagcaactggccgagagaataccgcatgaggggcgaaacgatgactgttactgacttggttcatacatgctccgatgttcgtgggggttcgtatttgcccctccttctttatcgtgcttgaataccttaggtactgacctgtccactagttccattcaaccttactgctcgccattaccgtgaggtcgaggcacaagtcgaagaactccggcagaacggggattggggctactactacttctactatcagcgactcctgcagacggcccttggaaggtaccacgtccattcacccaatcttaacgacgatgttcaggtacaacccatgtcatttagggcttggttggagaggttctggggtgcggcagcctaggcctcccgctgaatcatggtagcacaatcttcatggtgatgtctgggacacaagattgggctaccagtggaggcatgctggtgacatgcaggaatattgcggctctttcctttgtcttagatgtgacaagttcacctggcattttctcattggggattcttcccatgtttggcatagatgcggagctccagtagccaccaggttacttttcatcgctgttcagatcattcaaaactaccatgtacaaactggtctcataataaatcacttctcttctatgtttacctgtcgtcgcctggtaactattgttctagatcaccaaaattcgccgccaaccacttgtcacgcatagcccatcagcggggtggcacggacatttgctactgaagctgaggtaacagcattgcatggtgtagagagggttggaagacggtagccacaacttcaggttagatggacaagttccagggctttcccacagagcctcaacagcgggctgaaaaatgcggtgggcggcggccaccaaccaaattgtcaagtgctgtcacactgaagttcacatgcaacctggaagccgtacagccaacagccaactctagttcgccggatctggatcaccatgcatacattcgtcgtaacccatccattaagctatccatgccaccgcttctcctctttccaaggtcaggaatccaaatagagtgcgccgtgctcgacggtagttggacgcacaaggatggcacggcccgggcgacactgaaggaccctggacacccatagggctggcccagcagtggggatgattgggtgatccctgtccactgggaattctatgtacaggatatacgtacgtcctcatcgtgtacggttcttttctggaccaaagcagtttaacgccccattcaacaatgtggctacatgatcgatgtaggtgaagtgttaggcacacttttccgggtctgagcgcacctctctggctactcaccccatctatcatcaactacactagcaagtaccgtagactgtcccgacgggaaggaagctcaccttaccccctagatccccacctgttcgcggctctttgccttacacccacttccaggtcaagaagcatttcgattccgcgatatccaaacatcaaacaagtcttttaatccaattcagcacccctccgttgtaaccaaacaatatgcgaaaataaatacaacacctgcaccgcgccccaacagtgaatccaagtccctccaccatctacctcaatctaaccttacacgacgtcatcgcatcgatcgcataatgcacaacccatttttccaggcaaaagattagatgaggctgtggggcaacaagtcacctggggaaaggcacagacgaaacaaccggaccggcagtagccgaagtgcaagcagcatgtttgcttgtttcaatttcgttccttccatcaaagagaggaaaataaacgattccagaaggaataactaatcagccaaccggatgtgctccttctccattacaggagctgcctgaggggcacatgggatgaaatctgccccgattgccaagttagaggagtcaaacatccgtcatcgccaacgtcatgatatagacacatcacgcccgatgtgacggttacagcaccaaaagcaaacgctcgtgaaacacatcaccagcgcctacgatgtcatcaaatttctcgtcgtaaaccacaccacaagcgcggctaatcactgccccagcaaccttgccaaccacccctcttctcaacaggcatcgagataaaagacattgactggcagtcccttagttagccgaagcagtgacatcgccatcgccgtcgccatctccaccctcgccgtaatcatcgccgtactcagtaacaatccaaagacagaagcgctcccactcgaccgcccattcctttaggcgtttggctttcagtccagaccccacgcttgctgcacgaatatcccgtatcctttaggcaattaacaagtggttagaatctcttgcctcttcaacaaggacgtagatgggaacggagtgatatcctcgctccagatccccgtatactactatccggatgggggcacaacttaccatgactcaggaggctggtcctcaaaggcagcccaccgaacactgttctccgccagagacccgattccagccaggcctaatgactcccacgcatgcagtgctgtccagaactggtgtgtcattcccaagccggcaccttctcccgcattttccttcgcatcaccaagtgacaaggcacacggaacaccctgagcgatgagggccaggagcgggtggttcgaaatgtcgcctttgcccggtaccagacaactctctaccaggatcctcttgtccttgacagcctccatcatgcgcgggtgtctgtagagcgacggagcatttccgagcctccgtgttccgagcaaaagagcgtcgaagaggttgcattcgccagctccatcaatgccaccccccgcgtccaagaaaaaggggatttcgacttcttccagtgcgcactgctttcggaaccagaagagttctggtagcatgtccgtgagcgatcttccgagagcgtcggtgtcggcgaggtcgtagccggccaccaggtcagaccagatcattttggccgcgatgcaactatccgcatcctcaatgatcgaccgttgatcctggttgcgggtggttgaccagatgatccggagtccccagaagggcggtcgctgacccgggtcgtcgggagtggttgtggcttggcggcaatagctggccgcttcttgtccgatgacgacgaacaactggtcagagtcgggttctggcgactctgagcctgtgcggtagtaatcaagggggaaagtaagcctaacatgggggttgtgtattagtcgtggcacactctcgttgatcaccatagtggtgttgttgccacccgtggggtttagaaaagggggagatggattacgaggcccatcacggtggcctagatagagtgtagagaaatccttaccgtagttctgaccacgatagaccgtcctccattagttgaaccaagagatgacgcaggaactttcggaatattggctcgtagtagagcatgcccctgagtaggcgtgaatctgcccggccctcggccgatgagaagctttcggttttttcggtttgtggcgtcgtagtagtaatgctgtcatcactcctcgatactacaccgcatcttaccttgagccatttgctgaagcctgacctgcctccttcggggtagtcatccgccgcattggtcaggggcacaaaggttccgctctcgtagtcagaactccatatcgactgctcgcttttctggtcgttctttcggaaccggatttcgactcttctcgtggtatcaccccttgcctctgccgtagcgagatttccattcgaggatgacagacacatccctggtgtctcgagtgccagggtgatgaggtggtcgacattagccaaagcgagggcgtccatctgggcgcggaggagaccgccttttggtagccgctggatgatttgccatgatttgggtttggtcatggcgtcgggggtgagagtagtggttgtgacatggtggtgctcttcatctcgtatcctgtcgacgatgcggcatgctgccttggcgatgggggagagggcttgtcggaaggaggagtctgccttgttttgtctttcagttactactacctgttactttttgggtatggagtggggttagggtggggatgaggtagggtacacataccgcttcgctgtttatactcttcgtttatgagggcggtgcggctggagagatatttttggaggatggggtcggagggggaggggagttcggttgtgaggatggagtggtagtcttcgtctgtgaggggagccatattttggaggtgagaagatgcctagcggggagattggtgatgagatggttcggatgatgatgtggtagtgggacagcgttgtgagatgacgtcggggttgcggttatagcggctgtttttggtcggcagcgctaaaggcgacgttggcgggtaattagacgctatctccgggcggttgaagcggttattgtggggtcagagttggctaccaacctgggtaaaatatcatggacagctttgattttattgtgacctaggttggtctttgtcattcttcaatggcattgggggaagaaggtcataagaactgaaatagtcttatttattgtctcctgttgcctgtcgggggatttgtgctttttgagaggttcttgactgaggtttgtcaaagcggaaaatcagaagagtttgagggacggtgatgcctgagcgtggcaacaaatgcttgacagttgaggctcgcagcttatgtccatgatggagcgaaatcttgaccaaaattgccggcctttcgatcaagacacattctggcttagcatcattgcggcgagatgtaaagttactgtttaaggcaattgatgctcgaccgttgcatggtgcatacacaagcctctttagctccccgcgatatccccgctcggcttcatcccgatgcaagatccacgagtcaccaaggcataccgtgaagagttgagcctcgggagggctgaaagtggttattagcaggcagtatctacatccagaacaagaaatacggtttcaaagatgaatagaataggcaagtcggcgacatcaacgttagagggtttgtcagcccgggtagtcgcgggcgtggggacatggtggggtaccctacagtagctatccggtcatcggtcggctcccgtggggcaaccaccccgagctacccctccgctgattccgcttcctaactgtcgggtatcatacaaagcagcgaataagattactgcaaactccggagtatatggcttggattgcttgctgttgatcagtctcgctctgcagccatcgtgacgccatctatctcatattctcatcccatctgtttcaaacctccaatttctacataagctcagtgggcgttcatcccatccaatacctactctgtttttccttttcacatcatcacctcagatcgagtctccctcgcaccaaccactctgacttacacaagccacgtcaacacctacaaaacccgcccaccatgtcttcctcacctgaagcctcaaagaaaggcggaatccgcatcgccattgaccgcggcggcactttcactgactgcgttgggtccctgaacggcgagaccatcattattaagcttctctctgaagacccctccaattactcggatgctcccctcgaaggcatccgacgcatcctctcccactttctcaagaaagatatccctcgtggtcagcccctcgatacgtcagccatcgagagcatacgtatgggcaccactgtggctaccaacgctttgctggagaggaatggagagaagatcgcctttgtcaccaccaaagggtttggggatattttgttgatcggcaaccagtctcgcccaaagatctttgacttggcaatcaagaagccggatgtgctttatgaggaggtggtcgagttggaggagagagtgacgttggaggattatgctgaggatccgaagcgggtgcttacgaaagtggaggccaaggctgggacggaagaggcaaagaaggaagagattgtcatgggactgagtggagaggcggttaggattctgcaaagaccggatagggaggtaatcaagggcaagttgggggagatttacagaaaagggatcaagagtgtggctgtttgcttgatgcatgggtatactttcccagaccatgagaggttggtgggcgaagtggccaaggagattgggtttgagcacatcagcctgagccatgagctgatgccgatgatcaagttggtctcaagagcaacttcggtctgcgctgatgcgtatctcacgccagcgattaaaaagtacattgctgggtttcagaatggatttgaaggcggtagcttgggctcgaagagtgtcaaggaaaatggcgaaaagaagggtgcgaggtgtgagttcatgcaaagcgatggtgggttggtggatgtcgacaagttcacaggcctgaaagctatcttgtccggccccgcaggaggtgttgttggttacgccatcacgtcgtacgacgagaagaccaaagttcccgtcattgggtttgacatgggtggtaccagcacagatgtctcgaggtatggagacggcaggtatgaccatacctttgagacaacgactgccggtgtcaccatccagtctccacagttggatatcaacacagttgccgctggtggcggatcaaggctgttcttcaaaaatgggctatttgttgtcggtcccgattctgccggtgctcaccctggtcctgcttgctaccgaaagggtggcccggcggccgtcaccgatgccaacttgttcttgggcagattattgcccgagttcttccccaagatctttgggaagaatgaggacgaggccctggacacggaggcgagtagaaaggcgcttcaggaaatcgcagaccagattcagaaggaaacgggaaagaagatggacatcgatgaggttgcctatggattcttgacagttgccaacgaagccatgacccgacctatcagaagcatcactgaggccaagggacacgacacatcaaagcaccgtctggctacctttggaggtgccggcggtcagcacgctgttgctattgccgagtcactgggtatcaagcagattctggttcatagatactcttcggttctctctgcctatggcatggcccttgcagacgtggtggatgaacgtcaagagccagattcgagtgtgtggagccaggacagcgaggttgttggccatctcaagcaaaaagtcggaagtctgaaggaaaaatctcgcgaggccttgagagatcagggatttgacgacagcgagatggtctttgaggagtacctcaatatgagatatcgcggcaccgaatcagctctcatgatcatcaagccgagcgatgacagctgggacttcggcagggcttttgtggagcaccaccgctacgagttcggctttacgctagatgagagggatatcattatcgacgacgtccgtgtgcgtggcattggcaagagcttccagtatggggagaagacagtcgatgagcagctcaagacagtccagcgcacagatgtatctccagagaagaagcactccgaagccaaggtttattttgaaggaggccggctggatacccccatctacaaacttactgatctttccgttggcaacgttatcaagggtccagccatgttggcggatggcacccaaaccattgtcgtcacccctaacgcgactgctttgattctcgagacgcacgttgtggtcgaccttcccaaggctgcgaaggacaagtcctctgaaagtatggaagagcgtgaggttgaccccatcatgctcagcatttttgggcaccggtttatggccattgcggagcagatgggcagagcgctccagaagacaagcgtcagtaccaacgtcaaggagcgtcttgatttttcttgtgccatttttgacgcgtccggaggtctcgtagccaatgctcctcatttgcctgtccacttggggtccatgtcgacttgtgttcgcacccaggccaagatctgggagggcaagctcaagaagggcgatgtcatcatttccaaccacccgtcatacggcggcactcacttaccagatatcactcttctgatgccagcattcaacgaggctggtgataagattctgttttatgccgcctctcgcgcccatcacgctgacatcggaggtatcacggctggcagcatgccccctcactcccgcgaactgtaccaagaaggtgccgccatcaagtctgagaagcttgttagcgagggaaagttcaatgaagaacgttgcattgagcttctttatcaagagccagccaagtacccaggatgcagtggtacccgcaccctcgctgacaacatcaacgacctccgcgcccaggtttcggcgaatcagaagggcatctccctcatcgaaggcctcatcagcgagtatggtgaggatacggtccagttttacatggtggccatccagaagaacgccgaactccaggtgcgcaatttgcttaagactgtatcgaagcggtttcaaggcaaggagctctcagcagttgactacatggacgacgggtctcccatccgcctcaaggtgaccattgacgaccaagcgggcgaagccatctttgactttgcgggcacaggccccgaagtctacgccaacatcaacgctcccgaggccatctcgtactcggccatcatctactgcctccggtgcatgatctcggaagacatcccgctgaaccaaggctgcctacgccccatcacggtcaagattcccaagaagagcttgctgtctccgtcagacaacgctgccgtggtgggcggcaatgtcttgaccagtcagcgcatcacagacgtcatcttcaaggcctttgaagcctgtgccgccagccaaggctgctgcaataacttgacgtttggctttggtggaaacgtcacgggccagaaagaggtcaaagggttcgggtactacgagacgattgcgggcgggagcggcgccgggccgtactgggaggggacagatggagttcacgtgcacatgacgaataccagaatcacggattcagaggtgtttgagagacggtacccggttttgttgcgggaattctccatcaggaggggatcaggtggtaagggacagcacaggggtggtgatggcgtggtgagggatattgagtttaggttgccgatgcaggtgtcgatcttgagcgagaggagggtttaccagccgtatggcatggccgggggtgaggatgcggaggcggggttgaacttgtgggtgaggaaagtgcagaaggctagctgggagacaagcttgaagaggctacaggctgagaaggaaggggaggggggtgatggtggtgatgacgaaggggagacggaggagaggtacatcaacatgggggccaagaacacggcgccgatgaaggcgggtgaccgcatcatcatccaaactcccggaggaggtggctggggcaaggtaggtgaagcgaaggcactcgatgcctcgaaacatgatccgacccagggatggaaaaaaggttcccatgcagcgcgggaggatgccgctctgcaggtctgacgggttgacgttggcgagcggcggcggcgggttcgaaaccacatggaggcgagggaggatggtgaggggccacggggagggggctctgttgacttggaacttgtttgaagggtggaggaggaggggttgttgggtcctcccgagggagtggtcttccctgtctgcagagcacagacccatgcacaaagggttctctgggacttcttgggctcttgggatttgttgaagagaccttgttggttggagtgggagagcatcttctggcggcgggtaacccggaaaacttgtctggataggaatacagtcttggcaatgttgtaatttccctctcgaagcgatccacattgaagatgtacccagccaccgtgatttccatactttccccatctcgacgtaaagagaaagaaaacttacaagagttttgcgtcatggtacgatgctaatgtgtgttgatcagtcgacgagtggagaggtacagagtagccgtggcagcacaaaaaagagagtgatgacgggtcgggttagggttccccatgtgccgagtgtgcaaaaggttggggaaacagctgggcggtgacgctagcgcacggccgttgcaggtggttgtcgcagcaacgccccgccaaacaaacagagcagggatgttatggagcccgctgaccactagcgaaccgcggttttgccctcgtcttgggaaagattgccatgctgttcgtgggccgtggcacccgtgggtctttcaacgacgacgaagcaactgtaactgcactgctgaaatgttacccatctccgtacttcgggaatgacgccttgattcagcaagtcccacgtcccaagactgtcccaggctgtcccagactgtcccgatttgttcgtgccctttcccaattcaacctttctcgaaggagacgcatccctgttggagggccatttctacctgacgggggggccattctttactctctcttccgctccaccaaagaaagaaaagaagaaccgcgctggagggagatgcgaaaacaacgaccaagatgattgtgtccgaaaacctgcgtacggcgtcgctgtacatcaacaaccagctactgtctagaggcctgctgcgcgatggccagaacatcgactttaccaacccgggggagagcgaggaggagatgggcgagaccatgagccggatcatgtcggtggtgaatgacttgattttgcgccgcgatgtcagtttttatacccaattcccgccacttctccaagacatcggcgtactgacagaaaccaacacagcgcgatgcagagcaccgtgaatctctctccgctactctccgcacgctgcgcgccgagtccctccgacaagccaacgacatccagcgcctgcaagaaaagaacgcagaggcccagcgcaaagccggcctgagcgacgctgccgaaactgctctgagagcgcacatcaagacggccgaggcgacgattcaccgcctcaaagaagaggctgcgaggacgaagttgctggccgcccaaacacgatctgcctgcgccacagaggtccgcaagagggaccgccagattgaagggctgaaaaaggcggtatcagaagcggctagagcgagaggcgctagcaagagcccaggtgtcacctccatcacagtggttggcgatatcggcgccgatgaacagggcaacccattgcctcccacgcccacgacgacggccagtagcagtgatgggtatgatctccgtcaggaaacaaactcgtttctcgctgaattggccaaggggctgagcgaagagaatgaggggcttctgactctaatcaggaggacgacggaacagttgaaggacatgagcggctgggacgctggaatggtggacagtgacgggtatgctctgtcgttgcccaccggttacgatgacatggccgctgagattgaggctgtccttgaacatctgaggacgatccttaccaacccatcgtttgtgccgattgaggaagtggtggtgagagaagatgagatcaacaggctgcgcgacgggtgggagaagatggagacgcgatggaaagaggcggtccatctcattgatggctggcggaggagaatgcaggccagtgggcggcccgttaatgtggaggagctcaagatgggcctgcgccttagtccggtcaaggttcaaaacgtggaagagacggctcaaggtgggctaggactgcaattggaatctgtccatgagggccatgagagttatcatcatgatcaagttgactaccaggacgaggacgagggtcctttggagttggtgcctgagggtggcatagaggaacaggacgacagcgatacttcgagtgtctttgaagaccagcagattgatatggacgagttggatgttgaggagcctaacgttgagatccttcagcagtcggtcgtgatgccctcgcctcccgtcgctccggccccccagcccagcccgttgcgcgaacatttttcggccggaaacaagggtggaagagacggccccaatttgaggagacgtccaaagtttgccgaggaaggcgtccggagccgacccctttctgaagaatcgccgttaccacctccccatgccgacagaccccagcaatcaccatccaagaagccgctattatcagtacggaccgtgccttctgaggaaactggcacggctgcgcaaccgccttccgcggccgtctctacacctgatacatctatctctctggacagcgtctcgttgcccaaggccgccgcggcggaaccgaagagtgcagtcacgaaaaagtcagcgccaacgcccccaccgcatgcgacaagaccaatcaagaagccatcccctgccccgagaccagtaaaggaaacacgaaaacctccatctcggcaacaagagcgggaagagaggaaaactagtactaccagcaccaccactacccggcagcagcaacaggaaagcgaagccaggcagaaaaaggtcacttcccggccccccgtaacacgtcccaccagaccacccatcacccgtggacgctcagagacccgcaaaggggacagcgatacctccaagccctccaagccaaccgcccgcaacacctccgctacctcgaccacctctacccgatccgcgccagtctcatcgagctccaagacctctatcccgcccaacccagaaccagcgcccggaaaatcccctcgccgcgtgaactctcgccttcccctcccacgtaacgctggcagcagcggaagtaataattccgcctgcgcagctggtaccgctactaataacgccccggtattgcaaccccctcagtctccaacacaagcccagcaatcccctctttccatggcgaccattcaagccaagcttgccgcttcggaacgcgatgctgatgcggcccgcgtgagagccaaactcaaggcagcaaggaagggcatccacctcccaggtcccggctcaggtcgggttacagccgagaatagcatgcccaacacacctaccgaaacaatgtcgaccaagagtatgagatcggagcagagcgactacattcagtatcagcctgagcagtatgacgatggtgaggatgagctcggcttctcggctgtccagcctcatcaggtcatccatgcagagaagccacgcaaacgggagaggaattatggagaagctgtggcggcacggaagacaagcgacaaggtggcaagccggagacggagtactttgaatccatgggagctggagaccttgataaagggtggaaatgccgagtagttgggacgggtagtgcaagagattggatatggattgaaaaggcaggaacagggaggcaatagttgttgggagttgaaggagctgcggagttggaaagtgttggactgttggaattttggagttcagttcatcccctttcatcctggaaggcattttcatgacgggttttttcgttgtcatatcttttcatatcattacatcgcattcccttcacatcatcaacctcctaccaccaatcccccccagttccatcgtttatataaggtatatacaccctcccgcatcacgtacaaacactgccatcactttttttcatcatgcattgggagagtttctggaaattcggttacactcacatcatacatcacacacacgtgtccccaaacttatctaccttgtcttaatcagcgctcgctttccccgtcttgactgttcagttcggtttctattcatgtttcgtggcaggcttttcgttctgaaatgtgtgttgttgcatggttggatctggtgttcatctcatgtcttcgttgttgctgcattttgtatttgcatcctctcactttgcaagcatgcttgccccataatcattgtcaaaggaaaggagtatctggaattttggagagtcttgtgcgagtatggaaagtattagacagtgctataccccccctacacccccctatttaataaaagaatatccatagttttcaatcttgactcttgttttgtatgtgactgtgctgggtaagatgcttgggtagcttatgacacagtggcattgttcaacccacaggaaatatctgatggcttggccgttaagttggcaagacaaaagaaagataatcccatcaagaggatggtgaggatgtaaacgacaacccagtccttggtactgggagacaacggtgccaagacttggtgatggagtcaagtggacccccaaaaagagccaaaaacatacaacaccgaggattccccagtggtcacccacctgagtactggttcggccctcagctgtttgactaggggagagcggacgggatcccgtattttcagctgggtatggtcgtatgtgatggttgttgttgattctttgccctatatgtgaagaggtttagcctagctgggaagctgagcccatgattgcagcttcccgtgttattacgactcagtgatcgctcctgccgttggtggtagatatggggatgtgctgtcattgggaaggtgccacctgctcaaagaaaacggcagaagagacaaggaagggacgacgatgacttgtctaccttgagttgttgctctgacttccatccccctttaccttttaccacattaccacattaccacattcccacattcccacattcccacattacccctttccagtctttcgcctttcgttactcctaaaattcggttgacaggagtctcgaggtgatcgggcatcgtttcgtcgtgttcaagtcgggtcggtagtccaagatttccaagatttcccccatgtagcctttccttgcctttgaatcctccctcacacatgatgcctccttcaagtcgagaaccacatcgcgtcctgtcgtccatatcctccgtgaatacccacctgggccccttccctcctcaccctttcacactcccctgattccccaacgctcttgcttggcaccttgccaacggcccatgaccaagactctccccttctagtctgcgcttcctctctgatccttctcgaagttgagtgggtacctagtcggatcggggtgtgaaggatcctctttcagccagttctcgcggttagtcatggcagccaatctccccatactgtatcgtatcgacctctcactcgtcctcccactcagtcaaatgtctttttgatcctcatgcttctccattgctctctgtcgttgcgaatccctgcttgtgattatgttgtcgtcgatttcgttcttgtgagctttatttctttcgagtcccaggcttgaggtccttctctcgttatcctgtcaggcatcgttgctcgggtgtggtcgatgtcgaggccgatatcaaaggccatcctattgtggtgttgtcaagtgttgatgttgccttcacgttgccatagttgtgccttaaccgcccagatcgtcccatcatccatcaaacgtcgaagtccatgcccgtcatgatcaaaataatcgagggaagggaccatctcttctgcaatcggggttgttgtcctcttcaacaagaaatgatggacaggagaagagggaagcagagagaagggggccgacgaggggaccaagggggggaggggggggcggacagtatgatatatagatacttcatcctgatgcgagatcggggaggaagaagaggggatgatatgcgtacttgcgcgtaccttgcccagcccaggtgtgggcgggtgtgcgtcacgagccctccttgttgtcctctccccctttcatctgacacctgtctgtcaagtgaaacttgtcgtttcgtccggtttctgtcagatgtcatgtcatgtatgccaccctcctgaacagcggtcatgcccacagatacccgactcttgttgtttcgtccaatgataagctgatgttcggttttatatccatggaatcattcatctggggcgttggtggcggccagagggcggttgtacaaggagtatgggggcttgatggcgtagttgggatcgtcttgatacctactcgcagagcaacatcgcaatccccgtccggtgacggcggcggcgatcccatatcaatatcttcttgtttttttccatatccctcgccttctcgcggcatcggccatcggttctttcggccaccgactttttattccgtgtgctgtcgtgtgtctgcagcatacaaagacgggacgaaacgaacgtgcatggtggccaacgacacaagaacaagcctcttgacgcaacgtacagcgaagaaaacactatacgggaagaagaatctagagttgatgtaacgtgtgatgtggagttgaaggaaagagatgaggacttacatcgccgtcgtccggcaccgcaactccctgtcatgattgaaaaccgctaaccatagggttcccttcccgttcacccatcgtcgacagtattttcaaaatgaagatagatggccagaatgcagctcaacccggagactcaatgactcgaatatctggttcgctcttcccccccaagtcctccgagataggtacccattctcggacttctcagggacaccaccggaggtaagcaaaagcatgtctctcttcctcccttgagacggaacacggggaagccgtgtgcttgacacatgtcaaaagacgtcaaggatctgtcaagaaagaagcagaacgttccatgtgccctatttctgcctttggcctttggtctcgcgcaccttctgattccctatagtagtctcaatgataccttctgatcccttatagcaatctcattgatattgaatagatgcctcataacgtcagagccctgcaaagtgaaaaggcttcacaatatcctctagaatggtgatgactggtagccaggaagcagatagactgatgttacccatcaccgccatccaagcccactttcttttctgcatgatgtaccaacaacgatcataaccacttttcgtgcggcttggacaatgtcatgacatctcacggcacaagggggcactggaaacgaggctctactttcggaatcgcctcgccctttccccatcaatggccgatcggattggctggcgccgtcaacagacgcctctttttgtacgtacgggcttcgcccaagctaaatctggtccgagcagtattgcatgtccggtctgcgtatgatacgccccggcttgttgatatttcggcaccgagccgtctttctgccccaacccacaaggccctcgagggggatatctatcaggtaatcatggtgtgctagaaccagtggacaccggttgagcctcccccgactcgaatcgacattctagaaacacacaacttccggcgccggcaacaaagctaaccgaacgttgaaaatggccgacaattactgtatctccgatgattaaaagaacaaggggagacttgtaatatcgtctgtggtgagagtctaccctggcttcaggaccacacatgaatggttaatctttcggatatcggggttcctccgagaaaaggcaagtgccaaaacagtcattgaaatggctaatggtcgcggctttgaccgatccaaaactcaagacccacgtgctggaggatcaacacacttcgggtgtccgtgatatgctggacctccgcgaggcgtgagaagctccgggcatagataaaaaaagagaaagggacctcggccataggattttgatgtttcccaaaccattgtacacatcgctagacatttgacaatgatgctttgtcggcagatgagaatgaagctgcgcgtctcggtcaataagtgttcggtggtgagccatgcccgagatcagccggctacgacgtactgccttgtccaatcaacctgccgaccacaacatgaagaaccgaagccaaggcactccttctttttcgacgagctctcgagactgccgccccgttgaagccatcacctcagttgtcaactcgacaataaaagcgccgaatccatgctagacaccctcctgttcagcgccgagacgatctcccgcaccatgattacgacgctagatcagccagatcgtctaatgtgacatggggcgaaccaatcggctgcagcatggaagggcagacgataaaagccgttggtgttttccaaccgtcagaagattacctagtattggaatcggagaagcaagacactacaacggctactagatgtcgtgtttgtcgggagttggttgctgtgtcagcatcttccgctctttgtttacctggcgagttttgaacaggaaatgatggaagacaaatggcgacgacattgaaatggtgtaactcgcacccgcactctgacgtgttctcgaataccccccctcgcggcttcctttcaagaaagaggtgggtgggtgagtggaggagggggaggacgttgtggcaggagccatccatcatgctacggaaggcacatcgggtaaggtaggtacgtctcttactctcttgcactcttacacaaacacaaacaaacacacagaccacagcagatcaccagagatcaaccaaccaagagaaacgccgctcccgccctgagacctcgagtctcatcaagccagcctctgagcttcgggatgtccaagacaccagagagacctggtccactcaaaagcttccgactgtctcagaccagcagattggtgcacggggacggtgagcgctgcccgtctcccttgctcaccgatggagtcatgtctgcctatcaaggcatcaataagatttctcgccaacccgttgaggaggtcaccgccccttctcccttccgggccatcgtcatgccggcggccccggagtgccagaatgaccggcatagaatcgggcgcctcgtatgattcgtgatggtggacttggtatacaaacttcagcccggttcagtcatcaaacaaaagagatcgccccgccaggcgccgacatggccaacaaatgcggggggctatcgccggcttggtcccccgctcggcgtctcctcgtgaccgagccacagcagctcgctaacagctcagcggcgccatccagccctgtgcttgccgtggagctcgaaagcgatatccaacacgagtcccgggaccaagaatatccatatctggaaatgggccaggatcatggcgcgccccaattggcccggtcatgaaggccgtggcgcggcttggtgactggttgggcttgatggcgtttgtggtgcaaagcatattcttggtgcctcccaaggtccaaggtgctctctctctcgacattttgttgagagaacccaacggtcacaatcaatcaatgcattactcgcaagtcgccaaggtgtcgggcgacaagcaatagactaatgctcttgaaccaaatcagcctatcaaacggacactttacgatcaacagccgcccaccccgccagcaccgggaactggagccttcatcaacaagcttatttttagcggactcgcaatatgctcgtaattgggccctctaaatcaccatatggttcaagatattcccgcatgtgcggagacgaagctttacgcgggctcgcacgacatcatcctctccccctgaccctggttctgactctggctggcccctggcgaaccactgagacaagcatcatctagcagagaacctagagggaacatgactaaatgacagtcgagaaagagtcacgagatgaccgaatccagcaatcttaccaaagtgacccctttggggagatgaagagctttgttacttgaagtggtcatgttgttggaggctgcggtggggtaatcatggagttgggggggtgggcagccttaaccctgacggccaggggtcaaccccagatttacaggggggctcgttcgggttagcctatgctcgcagctcagtggagctcccggcagtgggggttgtgctgatctgtccagggacaaggcttgttcacaaaaagcttgcttgcaccccgtcatgcagtattctcaagctcctcgaggccgtcgatattgagggcctcatctattttccagcacctgccacggaaaccaaaccaggttgcgggatgagatgttgcttcacactatacaaagttcccaaatgttgatatggccatatcaagccgcctttttgtgccgcagaaccgagctgcttcttcctggcttccaggtcccgaatacgcagcaaaagtatttgtcaagcagtagcaagcagtagatttcacaattcagcgagcaaccttcaccctcagctatcgacaactctggtcggtggcaccgacagtctgacttggcttcaccaactgttgtgtcggccaaacctagattgatcccccaacatgcacaatgactcgtgcccgcatgtgttctctacgaactaactggacaacttcttgggacggctattccgtctttccctggccgcgacgggtaacgggcgtgagagtgacttccctagtgggtcatatcagatgggggcgggagaggcagcagatgcagggtgttatgaacggatgaagaggaggggggtggaccagccgcccttgggccgcgcttaacagccagatgcagcggctggcagctccagctcacggcgtgaccgtatcaatgccgatgatgtgggttgatctcccacctggccctttgatacaacaccgaaccttgcatacgcttagtatccattcccatcgacgttggagaactggcaaattggcattggcctcttcacaccgtccggccgccgcgccccttcttccgctgcctcatccaccttttgctctcgccggcgccgaattgtgcctgagagacagccacctcacccacctcatccacctcacgaactcgccaacagtcgtcatcgatgccatgcctgggcagccagccactggctgatcaacgacgtcgtactctgcgacgattcagtcccgagacgatgtcttcgggtcccacggtgcgggccttgtccttcgtcaatggaacccttctagcacccaggtcaaacccctctctcgcctgctccccttgtttacttggcagcgttgcactcccggcgggctcaccctcatcttgctgtccctcgaaacccttacaatttcagcccgtcggccgactggccaatttgcgctgtagtcttcctcttcttccgggactcaagggcaacttgtgcatgtatacacctgagatcaccagcgcgtgctgtgctgccatgctggcaggtttcactccctggggagcgctgcttttgccctttctgcagacagtgatattcttctgtcggacctgtggcgccgtggtatcactgtctctgaccctttcgttctttcttgtgtcccagaagctgtctctcgttgctggacgcgagaggtgcccgcctttctgaccgctccttgactgctgtctacacggcatcgtcttcatccaaggtggtgaagtggattagtggctcgcaccgtcgataccacaaacgtcaccccatctcttttatactctgcactaccgcacgaccatacttcatcgggaacagtgttatctggccttgccccccctttgccgtggacctgttcccctttgccgtggacctgttttagacaaccaggcgacaggaagacgcgctgtctcaagtgtgcgaaggaagtacccatgtacctcatcccaccacatccttgacccctgcttctcttccataaaccacaacccatccacatgctggatgagctcagctttgccgatgctcaacaggcaccctgatgagcatgaatgggtgtcttatcaatatctccgtcgttcaaaaagcttccggccctcaaacccggcaccttccttacctaacttctccatcagaagaagaacaaaagctgcataccgagaaggtaccacctgcagacgcttaagttgattgcccttgctcacgtcgatcgggcctcggccttttgcttcttctgcgtacttccagtctctgctagactccttctcccttcacatttatcgtcgaacaacatcacaggagcgtcaactcctcgtcaccacccacgcctttggatacacacagcactgcccacaacaatccacctgtcactgtggcctctaggttccaccatcaacagcaaagacgcacagtattatggttcgagacgacatcccagaggaaggacctggtgatgtgcagcccaccaacaaggtgttctgtacatactgcggaaagggcttcactcgcaaagagcatctcgaaagacatcttccacagcgtgagctcattcattcaacttggcagcacacatttgagtgatactgacgtcgtgtggacttgtagacaccaacatcaaaccacacgtctgtcagttttgcaagataggcttcagccgtcggtaagatgcctgcatgacctgttagctatgtaccaacccttgaagctaaccatgggatccaacagggacttgctgcaacggcacatctcctcgctccacgaacaaggccccatcgatgctatcacgggcgggatgatgactgtcacaggacggacacccatttcgtgccagaactgtgccacggcaaagacaggatgtgacaaaaaggtgccatgtacgaggtgcgctgaaaaaagcctccactgtgaggctcgctatgcccgacggtcgtccaaggcggctattcgtgtccagcaggcacatgctgcgcaagcaagcgctgttgcatcccatcaacaggcggcggcagcagcttcggctgctgctgctgctgctgctgctgctgccaatttcatggcataccctgccgctccgtttggccatgtgtcacacttgcctgcgaccatcaacccctcgtacatggacattatgagaggtgttccacttaagatggaggaaaagatggaatcaatcacagtggacacgaagccacaccgctcccccatgaagtctcccatggtcacccatcctatcagcccgcctagctttccctcgccacacaatcggggtgatatgggcatggatgagtacatgggtgacatgacggacccccagtactttttgtcgccctgggacacctacacgatcggcggtatcgacatgtaccaagctgatcctgggaccatcccgctggaaagggccgacatttcgatggactttggcgtaaacgatctgtctgcccctacatcagagccgatgacggcgagttcctcgcgcgggtcacacaccagggagacgagcatcgtctcggcagccgaatatgaaactacagtgaggcaacggcaacatcagcatggacaggcggatttgtccttgtcgaccatgccgaccgacagctccatccccgagtttgaggttgtgcaggtggccgaaggggcgtggaacctggcgcgatgtttaccgcctttgcccacaaccaactgcccacgcacggcgattgtgcatctcgagtgcctggagaaaaagtcaaaacaagaagggacgtggagttcgttggagaaatacctggagcaagcgccagacgtggctgatttggggtcggtggtgccgatcaaggaccgcacacgtgatcagctgctggccatcacgcaaggattcctctacaaggctctcgacattcatcgcagcagcattccgccctcctcatacaggcctggacatcccaacgccggggaaccttccaacttcaactacattgtgctgccgccgtccaagattttggagtattttttgagcagctatgtcagaagtttgtcggtgtactaccccttggtcaacgggggcgtggatcccaatgaaatgctgctgcaggacaacttggcctcgacactcttggtcctgctcatgattgcccaaggagcggctgcgatgcccatggctgaggcgcgatacctttcggctggcttgactgagacgtgccggatttcgttatttgatattgtcgaaaaagacgtcgagttgtcagcagacccgattactctgcggtgcgctttacttttcctcgtgctgggtgcgtggagcggtgacaagtggttgatggacattgcgatgggtcagcgggggatgtatatttccgtaagtttgaaaatccttgtcttaaagagtgtagaacaaagctaacttgccacgccatgagatgctcaaacacgcaagcatgatggagtcgcagcctgccatgattcctgtgttcaacaagtccagcgaccttgagctggaatggcaccattggaaagaaagagaaagaaggaacaggctggtttacaactacgtcatgctcgaccaggagctctccctcttccacgacgtcacgcccctttttgccatcaccgaactcaaatgtcctctccccggcccggagcccctctggcagtgccagacatccgctgaatggctcaacaagatgcaatcggcgtacggctccactgccaacgtgaacccccagctcctcgaagccgccaccgtgacgccctccctctgcgatttgttccaagacttcctccatgacaacctctcccgccgccagagccaaggcggcctctcgccccagcagctcagactcctcctccaccccatccagtccctcatctgccacctccgccaaatgctctcttgcttttctgacgttctcagcggcggtcccatttcccgctcgcgcaacccgggcaccatcacccgctcctccacccagcagcgcatggacgaggtgcaaacccttttggccaagtggtatgacatgacgcgggcttatctgcaaagagaaccaaactgccccataacgcgttgcaacctggtgctgtaccatctcatctccctcaacgcgacggccaactttcccgagattgaaagacttgccaggagggaagcgttttcggccgagggcacggactggtcgtgggagttgaatctgaggtcgaagaggtgcattttccaacgggatcagtcgatgtaccactgcgggcaggttttcaagttgttgagggcgatgccgaacaatcggcggccggcgtggtggagcgcggcgatgtatagagctaccatggtgctttgggccatgagtttgacttgggggcagaatccggggttggtggatgctggcggcgctggggctggtgttgctggttcgtcgacgtcaccggttatcaagcagcagaatccggaggagggtggtgtgattgccgcggcgggggcgggggcgggagcgggagcgggagcgggaggagggggaggggaacaagtggtggttatcgatcagataactacggaggaggagaagagggtgataccggttttgtgggaggactctacggttgtagcgctgacgagattgccgcagcaaggaggtgggacggtcgtgattaagacgagggaaagcaaaccgggggagtcgtcgggggagattttgaggtatgcgattcagaatattgatgctgggttcagctcgagggtgggggatgggattaaaaggaagttggagcagctggggaagaactgggacggaggagccggttcagaggtccatgggcttccagtcatgaggtgagactgggcgggtttggcttggtagggtttgtttgttttggtttgctgattacttatgaggatgatcgaaaagagaaaatggggtcaaatgaagcgaagagcgttttgttatggatatgattatattgttagctttctgcttcttgcttacttcacttcgttggcgagactgtttggggtctgctgttgcggactggagtggactttggattggcaggtacttggagaagaaaacagattccaacaggggtatcaggagactcttttgttttctttcggttcatacttagggaggtcaggagtttatggttgatatgagattcgggatgcgagcgggctttggcaaggcaagcagtgtcatttgtacattatttttattgtttgtattcatgaggctcaagaatgtgtggcatctgccatacgtttgatgttgctgaagactatcggtattttctggctacatctccggaggtccaaaattgctgctatcgagtgatagaggggtcaaacagtttgacctggcttgtcagagccgatgatagacctacacagctggggagctccgagtagataggtattcgacaagttctcatctattccccatgtgacgtgcattttggcctgtgtacctatctatcatcacagtgttgtcggtgcttgccctctctttccccctgagagcaaagcatgggagatgtgatgaatcactttcttgtctgttacatctaacccccatcacccacccccttcggcctggggaggtaggctcgttccgctgttgcttttttttttcgcttcgggttgcgactttgcgacagcacgttttgtcttatgtcagaaccaagaagaatgttgcacatgatggtcatgtcagaactaacaaactgtgtggctttgttcgtgtgatggatggactgggggcaaagcgagcttctcggatgccgagtttgagctattgggacttttgaggtgagggcgttgatattggaggttcggtgagggcacttcgttgtgatggtggtggtgttgttggcttgacttgttggtgatgaatccatatcgtggtgtcgtcgtcttcctccgtacggaagaagagggaacggcggccgaacaacagggctgaatgtcttgtagagtgagccgggcaaaaggcttgtcacatctcacctgcaaccataaccacccatcggtgaactcctgatgcgagggactggatgcgagagcgttgagttgttgcgtgatggaaggtgtgagtcgatgggatgctgacggacatcactcgcttacaggcatatatcaccacgacatctcggtcacacagtactcaaaagacagtggtagttaccacgtcggcagttggcgtcccggatcaacagacacaagttcattccgttgcggcgcagggaagaacgtggtctgctttgcagtctgggtgggagattaggaaaaggtagctgatgctgcttacgggcgaggtttcccagagaatggatagggccaggcccgagcacacacataggcttcggcgggggaggcacagacatttctggacaggcgatacttactcacatttttggtcataagtttcctagaaggagagtcgacgaattcttggcaccagcccaaattcttacttgaagccttcctggtgcttgggtccgaacgctcggtagtctccaaccccccgaagcaccggacgaaaacacccagagataacatcaaccaacaaaccaatctgctgtcacaaggtccagacttctgtagaacggtcagcttgatgaggccactcactcttcagcgtatatattgcaaaaataagctcattgaacacccccttcttggcatcacgcatccaaactgcttaaatgctctgcataccaagcgaacgtataggattggacggtggggtgggggttgtataaaaatgctgtctatcacccgcatgccaagactttcactctttgcatttcttagagccatccggggaggaaaaagggttttttcccaggcggacgggggtaaattatcatcggaacatttccaacgctatgccgcctggttcctgtcttggaagctgctgcgggggggtgcgggataccacgctcttctgaagcggcgagccttctgattcggccccccaatgacctggtcgggacgggcttctgaagaggtgtgggtgaattccaatcaaatgccgccagttgtatattagccaaagatattaaaacggggggcatcggattaacaaacgataagttggacactgcctcgacgtctcaacccagttgacagtctaagcaaggggaacatattcgttccggtcttacttgcacaaggaaccccctgatctaatctttgttttcgatatgaacggtcaataaacgaggcctcctctttggccagttcgcgactgccaacgtatatcctcctttgggtggaccgggcaagccaataccaacgcaaggaacatgggtaaaagaatgccgtaccatgtacttggattgatagtcgaacaccctccttgatgaccaccatggaacaatgttcaacaagggctgtcgtgccctgtggtcccatcttggtagtcttaagcgacgaggcttattcgcgaggggcagtcaccccgtaggacgggaactcttgatccccaagatttagtgttgtcttgatcgatctgttgcagagcggatggtggttctgcacagaccaatggctgtgaaatcgtggagtcagggttgcaacaggaagtcgatctgccgccccctgagatgggcattgtgcttcactaacaatgtggttcatcttgcctcactcaagatggtcacctgatactttctgcgaccatccgagcccgataatgacaagactcagattaggtccataatattagagaaaccgtgcacggcagacttagacaaccaggtgttgtgggtgttgtgtaggccgaacgggcagtctcgtcacgatatgatgggctggcgagaaggatgccgaatgaggacatgcatacaacatggggaaagacacagaacttgcatcctgtgtcccaagaatgcctcagccgatagacaggggcgatatggacaagggcgggtggtgtctcggtggtgatagggatagcggcattagcttcttgggggctcgtattgagatacagcgaggtagcgatgctgtgtctagtcttgatgggccgcggccttattgtgttaccggctcccagagcgttggagatgaggcaacagagattgcactcgctgttctcgtgtgcatgcgcagcccggaaagtcgggaactgtgcagcaggcggccaaaatccatgtcgcgatgttgccattctcccacgggcatgccgtatgatgagacccaaacaactctggcgcagaagcgggacggggcacgggaaaacagagcacaacatagaagactcggccgactgtccgggaattcttcgagacgggcctggtgatagctatctgttggatgcgtccatcaggctaaagtcagccctcgcgcatggaaccaagctgcgggtatgctattgttagtgtcttttccaatacgtcaatatcagcgagattgctcaggcatccgctggagcgtttctgtgaacaacaaactgcatgttatctcgaacccgttcatgacacgaacttgttgcacagcgaggcggccaccagacgagggacgccgccagaaaaaggcccgctgctgtcgacgatcgaaaccgacaacctgatgcttgggacttatcccagcatgcaggtcgcttcctaacgatagcgtcgtaaatgcaacccagaaatcagcaaaatatatccggatcagatgtgccgcagcctcggtgccgcagagcaactggtgtgcgagaagacccaggccggagtgaacttagggtctagtgcctggattcgggcaatcaatggcgatctgggtgttccaatcggtcaattaggttggtcttcaggctgcccgcgttggtgtggtcgagtgagacgctgttttgttgttgagttgacgttggaaggttgaagccaggcaccagggcatctgagacgtctctggaatcagccctaaccccggatccactagcttaaaggggctagtgcgcccgtgcctactcaaacggtcgatcgtgcacggatcacatcttcaaggcctgcccctgcacgcggtgtaaatcatcactgccaagcttcaacatcatcacagtatggagtttgtcgattcttgttcgcatctcccatcccactccagatatcacatcagcgttgttcctggatactctttggtacggcagatctcacaccttacttctatattgccaatcacatcagtactaacactcgtctagtcacctatcatccgtattccgaacggacccggcgagaagaagaatggccgcaaactgtcacattcccaactaccgtggccggagatacaatcaacgagtcttgatgtttttcccgagcgattgctgggctagaggggattatgggattcaccacttaccttagtctcatgttcacaacacggtccggacctccgtggggatcctgtgacatcacgccttggaggtttgtctgcttcaggtcggcaattgaaagtcaccctatcgactcaggtgcgcggctgctctccagccatcggtgtggtagcagccgagaccttgggacttctccgacttctcatgctcgaaaggagtgtctttgagcgaaggcttggtgtcttacgggcctggatttcatcattgccattaccacccttgtcgccatcaaccacttttcccgcgggctcgacgccggttcccacgggccggactcacattctcacccattgtatcagagccatgttaacggcatcatataggagtgtacatcgaatggcctgatgtatgctcttgctccgcctcctaaatgccagctacaagttgcggttaaaagtggatcctcgcctcgatcgtttcaccacttcaacggatgtcgcattgtgctggttgagatgatctcttccggggtgccaagctgtcccaaccctctgtcttggaagcgttgccgggaaggccttcatctcgccattgtctacacccgcagactgacagcatcttggtgccgttcgcaatatcaaaatcccctgcatgaagaggacgagattgcgggggcttcctcttgcccgggccggtcgtgatgcacgatctccatctggtctaccgattagtcacagacgcatatgaagattccgctttcctggaaggtctgaaatgaattggacaccatctgaacatcaagccagttccggattttgttccctacgcgcaagatggcatctatcttgcagtggtacggtgacgagaccagcactcccctgtctgtcgaggcctgaaattgacacacagctactcggagaatactagatcttgaaacctctctaacctctcttcacacactcaactggtatgctcgtccgtaggacagaagcagcagccgggccgatatctgtggatacatgctgagtaaacacgggcaacaggggtgcctgtggtttctttttccaatccttgacagtcgaaggaccgcgcctcagtggtgcacttgcacgtcggtggtagaaaacttcactcgccatcgcatcaaggagtcaacaccatccgataaagcactgttctctccagctatctcgaaacagagtgggactattcataggcatattcacaatcagatatgcctcgatgttgatatccatctatctgataattacatacggcttttcaggacagacaaggcttgcggatcgttacactaggctgatcccttgtcgcgttgcggcccgctctgatttgtgtatcaccacctgtctctcaccgtcgagcttgtctcttgggacgacggcaatggagccacagctaccacgtggtacatgacctcccatcgcttaccttgctgctatcggtgacggctacacagcgacgatattttgagtggtgctggcagccagtcgacactcattgacgtgtcttcctactgtttcaggtcgagttgggaagcagtaagaacaaggttctgcacccagtcaaagggggttgatggagagtagcgttcgctggtccccgttttgtgaagataatccttgcatgtccgtggaatcaatatggaaagggcgctctccatcgtggttggctccagcagcaaggtcgtgattcacaaccagcctgggcctgctatggttgcatttggctcgccacattccctctttcgtctgttggcccccaccccttcacaccacctaaattgtggctggcttccacaccagattgtcgtcatcgaagattcttcgggcacagcagccttgccaaacctttagacgccaaggggcatcatgggcacaggtttattgaagaagctgcacctagggcaggatcgatcacattcgcattacagtatctcacagaccctgaccacgcgtcctcgttgttgatccggggatattggtgtgagcagatccagcggctcaatctcaaaggctatcttgcagcttgcgttagctccagaaaatccgatcagtccgaatccataattcaagggtagtcagttatcgtgacttcttcggcctcgactcggcctattgacacagcgagctttgacgattcaccgtcttttctcagttggtcactcattgctttaagatgccctatgacatcacacccagatccagggcacgaatgcccgaggtcgatgctgacggcgtctacagacttgcataaggtaggtaggtaacatcgacacggctcttatcaaaaagcattgagagcctgccgctgtgcgcgctgctgctaccagctgtcgacgttgaggcctctgatgggacgacgggaaagtatcttcacgcccgatcatcttcggcaccctctctgcacatcacggccatgtagtccctggcatgcaccgtaggccaggaccatgagatacacaagaggaaatatcgcgagtcgatccagatcgtcgggagtcccagctgctgcatggtttgtttgatactgggccgcttgcggcacggggaccgatgcgacttgtctccggccgagaagcaggacgaactactgccggcaaaacgggaccggtggcagacacacaccaccggtcatgatatttgggttaagaaagggaagttgatcgacaatgataggtcctgatctaggtaccggatcgtgcgagatgctggaaaccagcttgccgatccgtgtcgagtccaacgaagatggtgttgtgaacgaaccttaaaggtatgcgtctacatgaccacacacttatgtggttgccaaatcacccctgacttcccccgcaaacaagattttactctctcagtatgcagctgctgaaggccagtagaggaaaggaactgagcttggtagcagcggcagcgttcagctaccacagagtccaggaacctggattgcaaccctccccaacaccacaaaaaggttcgaaaaagcgcttcaatcatgacgacttgagcacataacgacggaaatcccttttgtttcctgccctacctgaaaccggtgctattacttcacaatcgcgaaccatctaaagaaggcagcatcgtgcgtctgagctcggggctcggggttcttcgctggaagcagcatgtggtattccaccaccaccactttagaggaaaaagaaacagtgaaaccgaggaaccaaagtctaatttacctagcatcttcccaggatgaataatcctagatcagtcggcggccagtctggtcgttgaagatagcgacaattccacaaacggaggaggcattaaaatacagctaaccgtgaagaccaaattctctttctactacaaaaacctccagacccagaaaagaacccggagtttagcgcccctttacatgcacaccgtgatcgttttctgtcaaattccccttctcccccaacaccccaaccaaccagaaatgttccagacatccagccaccgcctacctaccttactcacacatgtgtagtgttactctaccagagctgaaaccgctttccttctctcttccaaacgcagaatgtcgtcatattacaacttcactttactagctaaagcccgaaacaagaatcgcaattcattcaagcttttttttctctccttcgttcttctccagacaatactactggcagtgtagtaccatcatcatcaggtatcattcatgccacttgacaggtgaccaaatagtctgctgtcatgataccttgccaccaccacttgaccaataaatttgacatctgcaacatggcatgagaatgacagcctgccatccattgcagcttttctcgaaaagagttaaagatcgacataaaaaacgttgtaggtaacaccctgcgatgccacacgatagccacgatggaaaataacttccctggtttttgatctttttacccctgttgaactgcatacagtgagcgacgatcactaagccccctcattcagataaagaaaagatagagtgctgagttttgacactgtcgatcacaacgggggcacgtatcctataagtaggctcatcactttgttgctttactagctacttgtactctataccgctttgttattaacaccttatacatataaaataatctaactacctagtttttatctatttctttttttagtttattttcttctaaatctaactttatttagataagtattttataaaccctttttactatttatagtacttttactgtaaataacgctacatagtattatagtagtaatctactatagaataagcctcacggtgacttattctaataaatagtattaaagatctgacttttagaatttattagatatattacttttttatttaaagtgtaaaaatctatattataaaaattaaacatattcttgatattaaaaatttagttccatatacaggcttaaaggccctgtaatggtagcgcgctttagtgcttatggtgcagcggaaacttgcgacacggtatctgtagctcactttaagatgtgcgtaagctctagcgccttacagcgctgtatgatagagtgatagtagatgaccttctgtatttacagcgctagccttctgtaataccactattttactctgtagtaggattcgcactcgtcttctactatatacttcccgggggccttatagggccttgcacccccaacacgcaaatgtgttaaagtttgccctagaactcaaatatttggctgcgttttgccaaaaatgtgctcacgcccatacaaaacaacgcaaaatcagtcaccggcttaccgtaagtgcgggtagttatgggctcacaaggccactatttctacagagcacttatagagcctttagtagcctaaatccaaaatttaggctattttaggccactatagcctccgatgcaaggcttcgaagttgactttgtactaagtggatcctcgagggtggcgggtaggtatgttgaggctattttcgccgtatccaccagttcttcggaactaaacgccttgtagtattacagcagtaacctactgtaaaataagccttacagggacccatttttaacagttagaattaattttaataagcgaataaaagctataagtaaaaaagtagtaaaaactatatttttaaagctaaagtacaagtattaaaaaatagataatataattaattaaaaagaattaagataaatttcaacgataaatttattattatcattaatattattaaagtgaaagctaaacttaataacggttttgatagcttatagaaatatatagatctttagctttaaatagtattaaagagctttacttaatttaatatagaaaagtagatttctataatacaaatatataagtattattagtcttacacgaaaatatagatctcactcatgcgtgaatacctggtagcgcaataccccagtagattcacttatttccaaccaaccaacataacaaaccctgcgaaggtaaccttcttagcttgggattctacactttactctattttcgaacctcagaccgttcctcagcgaccaaaaaagataccacctcgtcgtcataatttcccctccttccctatcaatcatgattcactaacaggccactaactcccactagtcgacgggaactcacataccctcccccggaggaacttccccggcagcagcagtagccagcagcgggtcgctaccattctgccctatccgattattgctcaccggtcaatcaagtcaactcccttgcgatcgacactagatctgatctggtcaagtgttgttcggcctttccacccttcccgcccaagctttcccgaagatcgagattcgtgagaaatcccatgttccaaagatcggattcctgagcgcgcgcggcacgggagggagttctagacctacagccaagtatggtagagaagtgagacaaacctcaatatggcccggtcataatgaattcatagattgggaaaggtggacaagtgtgcaagaccacagccaaaagctgttctacccttcacacacggacacacaaaaggggaagtgcggttcgagaagcgaaccatgcaatatgggaggaaacaacaaaaaataccaccttaacccgctcttcccgcgcgctttggtagcgtttgccccctccgggccttcggatccgaaccagatggagagcttggatgcttgatgcgctggccaaatccacggcttggttatttgctcaaactcgcctgcttactcatccatccggtcactgaacaagaggttgggaagcctgactctgggttgacccctcattaccacactcgtgtgaatgagctgggcttctcggggctgtctgcccctcactttgccaagttcaggtcgtcaccattcctcaagcctcccaagccccaaagaactgtcacgatgaagatcatttcctccttgtcacccccgtctcatgcaagccagagcacagagtggtggagtgactgaaccacatcgcaaaccatccgcctcccaaacaggtcaagtcaaggtcgtatgatggaaaagacacgagcattctatgcctatccgcccagttcatcagacaacatcgataattgggatagagagaaggttggaaaacattcaccgactgactaaatggccgtgctccccttggctttctttgccttagttcccggaggcggatagatgccgaagctaaactcgccagtcaataaaatctcctataggtcagttcagacacgaggctgtgcgtcaactggagaggtgtatgcggtcaagtaataatccatatgacttccctggctctgagacatggcttgcattcgtatggggcagacaggctgggcattggctcgagtttgagttccaccatacctatgtagaaagtaacatggtctctccatcatggatcaagacaagatccaaggagactcgagatacgatggctgcattcggtcctttcaacgtgcaaggtaggacagctactgcaattgctgtatgagtctcggttgtggttggttctaaaaaagaattgccttactgcagctgcagtggtctgatattccgacatcatggtttggggctgctcccaatgtttctgtatcatgatatcttgaaaaccactccaagcaagtgacgagaccctttcttgctcttgaccggctgcacatacaagcatacacttcggtcccgagaagccttccctggaagaaaagcgccaccagaccactccaaaaggattcgaaacggcggatacgtgggtggggtctttggccctggtgaaagctgaacctatcaacaacatccagacctggatagaacctctgtgcttcacgcggctgtttgcccgaaggcgtcagtctcccaaaaaagacaggcgagtgtgtgtgaagcagcagcatcggctttcctaccgaaccgggcgcagtgcagatgcgtcgaaaagggtcgagatcgacatattccaacaagaagagggctgcatgatagccgaccgacgcggctgagagatacagatcagggttcttgccctcgcatgccgtccaacagtctcaaagagaggcgcgcccacgatactcgggaccggccaaatgtgtatgtgtgtgtgtgtgttcttggttggctgttaggtatgtagtgtactgcgtctgttccaaatctgtccataatccgggtcgtgatgacatatacgtacgatgcgatacgcctgttgctggcggcgataggtcttggtgagtgtgctacagcatctcttgtctatctgtcaatcagctctaggtttcccttctcatttgcctccacaaaaccctgcatatcaggcaaggtcattaacataccgcgatgaggtctgtttgctggcctggaacccggcaatcgaagaggaatgtcccaaacagggctgggttgcgagaagggtggagttgcttcatacgtctcaacgcgacacctgatccaaggccttgagtcactttggtgataatgtcgagacgaatggccagcgatggtggctttgtgctacataattcgaaaagaggcagttaaggaagcggccgcccgccacccgagaagctaagccgcttcgcactgaagagtgtgagtgatagcgtgatgacatttatcaagtcatgttagcatacggggagtgggtcaatccaaccctgtccgcatcgtttgagcgcaaccacggcatatggcgtcttgaaagatagctaactgttcatgatcagtggtaatgggtgcggggttgtgagcgtgtagtgaattcgaggaatccagccacaagttggacaggccgatgtgacaagtggtgaaaaacgtggcttcgaagccatggtggaatgttggaatggcggaaaggccacccggcgcaagtagccgagccatgagcagatctgaactcgctggggcatccgttagcgtaatttaattgatagaagagcgcagaggcggaactctaacgcgggccgttagcaatagaatgcgtgttcggaaccacggggttacaccaggatgcgtaaagggctaccttgaggtggccttctcgtgccgcaggagtagtgtggttggggtggttaaggtggtccatgcacaaccccaaggtgatgtcgttaacgaaaacggtgatggccggctggtgaacggaccgcgttgcgacccgtccgcgggaggttgagaatgccttggtgaagagggcgatgctcgctagggagttgatgaattcccgaggcagggaactttcccccgcgtgttgttgtctcccgtgtgcacactctaataattaacttctgtggccaattcccattgcccgggaagacggatgggatggggatggtttcctagaatagaacatcagtcgtctttaattgcttgctcctgcgcaggccgagtctcgtgcgagagatgtaagtcagttattgcttgtgggggcgggcggaagaagcggattgcttaaaacattcttttaagcgggggacggcagggagagatgagggactgctcttttgcctagaaaacagacagcttttgttgcttgaagtcaaggaaaatagtgtgcgggacaaggcgggttggacccaggcacagtgggggtctggatcaagtgggtgaggggaccctggcccacctggaccgtgcgctgccctgagcaatgctattggccagaaggcatgtacgagttcctaatcgggaaggcagagctagcagggtatcccagcctaggtctgaaggggcatcggccctgccctggcaccaacttccagtggtgagtcctgttgctgttcagtgctggatcgggaagcgttgaaccatcgacaaagcgttgatctccatggcaaggtgctaagctatcttggaatttgcagagtgttttcttgatattctctcagtagtgcacatcattcttgacagtggcgatcaactatgtgaagagggcggggaagccgttttatctccagcgctgtggtggtaactccggaagcttaggtaggagggaacaaattgaatatgcaaataaatctcgacaagcagtaagctagcctcccaagaaaacgactctgatacacagctgcatcttttaaccgttgctgcctcgggtcatatcaccatcagtccacagtctcgacggccactgcaacccgttggggccctcgtttatgttggtttcatacggcatgatgagtgttgtgagctctgggttcgtggggtggaattctcatgtcaaggtcttggcaagggatttatcactgcaccccggttgatatggtctttattatgcagtcgatcatatattcgtacccaacctgggctactttatttagacctcgccgtttctttcatctgccattctggaattactagcacctttgtggcttctgggatgtgaatgagcctaaactcttcaaaatcgtctgtcataatctgtgggcagcgaaaagaaaagggggaaaattatatcatttaaatcttgtgcccagccagtgttaggcaatacatcactggtaagctcgggctttgccacccactccccagtggatgctcttccttcttggctgtgaaatggtgacatctgtaatgccgcttcgttccagtcccgggcccatctgcgggctctgtgctgaactcactctgtatcgtatccaagaaacttccagctgaatcatcgtcccggagaaccccatccaaaacggccaaccaagcaactgggacacactgtgcagtgaaatggctcgagaggttgtaccaccaggattcttggcattctgtctttactctttttgattctctttctaaatgttgcatagctaggatacagtacaggagggccggcaaaacaaaacgctaaaacaccaaatcaagccaaccctctaactgtgttgataccaaaacaaatatccaggtcaaatgttcccaagtcatgtggcattacagccaaggaacagtcgaagacaccgccacccatcgtgtagacttgaaacctgaaagcatccgttaggcatattagccaagacctgttccaactcttttgttgggcctcaacggtcaaccgtgaggacaggcccatttctcccagaataacgacaacccccaaacaccagacgcattgaaaatccccccacaaacgccttgatttcgccaaatgcacccaaccagggccatatacgactggggactgtgagcgagacagtcacctcatcctctcctgatgtaggccgactaagggacctcccaccaatcaacgacagaaaaagaaaatagacaataacgattatctctctgagctggtcatcaacggtcatcaaatccccgacgctgcggtagcgacccgatcggaaaaaggaacgacaagagcgagaagaaattgagacccaggaagaaaaagtccttcggaactccgtaatacagttggtgtttgatgggagaggggagctgcagatgcaatggaccgttgtcgttgcatcggggcggacggctatgtgtaggcaatgtcgcctttcctgtggtgtatgacttcgagggtggacccgaggttgtgcccgaggtatccaatcatggcccggctgacttcggggtcttcagatagatctgcacagacctcacgaaactgagcatacacctcttccagctttcgtagctcacgcgccaggatctccagctcgagccatcttccctcttcccccataagcgtgtatccgcccaggctaactcccagcgcatttggtgacgtcgccgctgggatactgccgttctcaaaataggtgtgggatgcgttcttatagaaggaggtgatcttgccaatgacggtcgcgagcagcatcgctgccgtatgtgttcctgacctgctcatgcatcgtgggcaactgagcatcgaggcacatccctccactgctttgcggttcaaggacagcacgaggtcgaagggtggcgctccagggctggaggcattgtgaagtgcttgtaacgactgcaaacaagcggtaaagcatgtgcaggagcccccagagcttgccgagctcgacgaggactttgtccttggtgttgacctcagctggggcgtcgcggtagggctggggaaataggtagctgacatgcttccaggcgtcgggatctgtgtttggccgtatgtgtacatgtctgcggcagttggatcggtccaaggcggcatggctgccgacatggcaaagtcgtacgaatgggagcgcccgtggttgagctgggctgccatggctggggagtcaacaaactgggaagacatgtcgttgggtggggtccaaggcatgcctgtcgagtagatgtcggtggccattgtcggatccacgtgggtggtcgaacctgtctccatacccagcatagccaacccagacatggaatgcgttcggctcatgcttccatccacgctggtgggaggtgtgtgccatccagtttccagcttgtatagtgggtgcgctgtctggtggaccgagtacagcatgcccttgtcgtcagatactggcgaggtcattcccgtcatatcagtgggcgttgtcgactgtatgttggagctgccatcggattttggtttcccggccctgctagatggggagtaccggcattcgatcccacaagctagacagcgagaacatattggccttgccttggagcacttgaccttggcatgaaagcagccatcacatgaggcgcgtagacgaggttgacggggctttgaggaagccatgttgaaaagggtgatgtgttgtaagattgcagtgagatggagtataaacagctgaaagtgtgttgcgaagtagaggcgaggtgacagtcggaggggtcagggtgataataagacgagtttgaagaacaaggggtgtgtgaagggtgcgagggaggtggggagagagtataatataacgtttggcggctcgaggaggctgcaggaagaactacgtaaggtgttatgggggcagtaactcggaatgataaggcgggcggaagggttgatcaggtcttgagagcccacgaggaggagacgtaagatgccacagccattacccaagcccttttcggacggatccagcagcgggagtgagcggtaagctgaccttggacggagcaaacgcgtttgagagggggagacaattaagtttagagaagcgagggcaggaggaccaagtagctttgacgcttaaaaagaaaatgcccaggggctcgaggaggcccggttaaaagaaaagaagccgtccaccgcgctaatgcccggacgatattttagagacacgacccacttgagcgacgagttgtgtgagacctgctcggtggaatatctgtggtagggcagcattcttttctcctggtgattgacaaggaagcgggaaggagaaagggtccctgaagtcatgggacagggacaggcaggccatactcgttgctacatgactgaaccgttctcatacagggcacgcgccagtggcgctggtgaacggccaggttagcatggacagaatcatatgaggccctcgagctctctggctttcgtctcattcgaagccatggggccaccaaacacggaatatggacgacctgcgcgatctgatggttgtgccggtgtatagatccgacaactggacatcgtgagctggatgccgtccttgatgcaaaatgagatgaagaaagacggcacaactcgctcgggacggaaccttgcaagacaggcccctcctctgttcccagctccaagcaacaacggatactaacaaacaggagaggcgcaagaggcttgccggggtgaaggagcttgtgtgggagagatgtgaagctaggtgtatgacgcagtggccactcgagtgctgaggaactacctacctggtcccacaccctcttcttcccgcggcttgagcctcgcatattctatatgcaagtgtgtgaatgcataagcggggtgtgagtgggggcaatgtcaacacggtgagcttgctgggtgtcgtaccttgtatctgcgtccagccaaggcctggaatcgagggaggtagcgaaaaagaccagacgggactggggcatagtcgaggttgaccttgtgggcatgctccgaagttgcactgggcttgctggagtgccacggaaaatacgatgcaggtagcatgcatcctgcaaatagagcgcgcacctgcaaggcaggcagacagttacagggtctcgagctcatggtagcgcgaaaggaaaagtaaatctcgtcttcttctcctcctcccctgattcccagggaccagcacgcaatcggcagctgggctattggcagttggtcgacgtttgactcttaagccaacaggttaacggcgctattctagaaaacggctgttagtgtggttccaggaacgacaaaggatgctcgacaatggggtggtagtggtggtggtggtgccacagttactgcgttagtccggaggctaccttggttgacttccccagcctaccgaccgatacggaagacaaagtcactgttccgaactgcgttgtagttcgtgactggctcgtaaccaaggagagatcagccaatcaaatccaaaggactcgagcgagagattgttggttttcttctgcgctccattggacgagagacatctgcgcacagatggttcccagaggcagaaaatatctgtcctgtcttttccatggtcccaggtcgccgtccctggccggctcggttccagtccagctggggctggctggcttgttggcggtgaggtgaggtgaggtgaggtgacggagctggaagaaggagagttgccaccgctgcttgggctgacgaggactcgtgcagaagggcatcatcgtgaaacataacaatcctctgttgcaggcaaatgccctagagaggtggtcaaggtgatggagtcgaacagcttgccggctcggagaatttggtctccattgcgatccgctagtgtgaactgtggagattcgaggtgatgccaagggttgcttacctaaggtaagcatatacatgacctgagaacaagcaacggagcacagacaatatcatcaacaacccgctttccgagcagagggaaccatcatcatcaagaccaagtccgtgccctctccgtctgctgggctcccatctgccgatcgttcgtcgccgcggatgctccaagacacagagcatcggatcacggatgcggcggattttcgacctcctttctctgccgcatctcgcaacggtggtgagaagcttgtcaaagcccgcaaccgctctcgcgaggcctgtcagcagacacatcaatcggccctaatgcgcagtcgacaacttgaccgctgactggccgtttttggaacattcgacacaggttgtgcaagcagttgctgatcgccatcttcgacaacaagcccccctcccccgagggcaggaaaccagacccacgcatatggaactcccatctggaacatggacaaatctcctgattgtgatgtttggcctaccaaggacgcttttaacggcgatccaccctccattgtcccagctttctgccctggcggttgacgtggcgcccgtttgaagaaggtaaacacccaacaaccactgaggacctcccgtcggaaatgcaggcgggccgacgagagacaggacctgcctgccgaaactccagacggaagcccgtgtgcttcttcaacacctcaagcgtcaatttccctgttatccgatcaacacaaaacaccttggcaccagtggaatcgcgtcttcggcagtctattgtgccgcacatcattgaaccccagaacaacaagccaccagagacgatttgttccggattccgagatatctcaacatggtggaatacggatcgacgtctcggagtggttattctcatcttgttcagctgagctcatctctggactgactgtacgccctccgtcttatagatctggacatagagattgccgggatcggagcagcatcaccgcctactctggagaaatggcccctatgacgatcagccggctgaaacgttgcggtgaaagagcgggaaggctggagatcagggtacgagcatcccaaattcagtgccgactctggagattcccatccagatacctctgccatccggcagccagccgaccgaggcttcctgcgtacgctgccgatcactactacgtcttcagggattacttacttggttcctcgaggtcacggcagatgcatgccttagggccctggccgccgctgtccagcgtggctcaggcggatggagatcaacatcagaatcggcgatgccttcgaacaatcagcgtgtcacaagctttattatggcgttttcccaggtctttgcaatattaaaaatacggaaagcacaggccagtgtcattcttgattaggcatctggcggtgacctttgtcatgggttgtcctcagtgactcgggtgactgcataggaggcaccaataggctcaaaaccagcacttgcgattatcgaatacatgcatatagaatcgcggaaaataccctcgctggtacagctgatgtgtcagttgcgggaacattgtcgagagaagcttctccaggcaagccacatcacggaatggcatctcgacgccgcctgcttgcttcttcctggggaaaccaaggcattagaggagaagccttcttgcctttgcagtagtgcctgtcagcttgatcgtcaacgcttccctcccctcctttcggaatgcgagaaatcccaacggcgcacatgtcggcaagcacactatttcttgggctggcccgtcacatgctcttataactatcacgagattttgagtggtggatttgatgatgacgacaaaaagaccagcgacttctgcagggtgttatttttaacaagcatcccttgcccattgactgctctcatgtgttggctttgcctttgccgcgcttgtctcttacccatcttgcagatattgcccctgcacagctcgctagctcagggaccggtcaaactctacagttcccagaagagccagacgcgctgcacccacccggacctcttcttctcaggcacaacatctccatgaaaatatcgccgtccatatttctcttctggttcccgaaggcccggtgcctcatggaagacggccatgttgggacgatcttcggatatcggaaggatcccgtcagcaaagggagagacgacgaccggggcccggggaacccacgtctgcgataacaccgaacccgatgagcgtacatgatgctcttttgggatttacgatagctctctggcaggggtggtggtacatgatgtctagtaacatgggggacccccaatttcttaggatgtttcccggaaacatattctatcactggggtcctgttcccccacgagggccctttcgttctgcatatggtggaacaagcaatgtgcagtcttcagggaagggatgtgttgggtttttggccttgctcagaaaagggtaagttgtacaggttggatgcaaatacccgattactcctttttctttctctccttttactccctttcccatgtctctcctgccattaccgggtatttcctggtaagataaaagaagcgtatgcagaatcatgttgactgtgcatatattcgccaaacccttgagcttgctttttgggaagaggggtgaagcgcccatagttacgcaaggaggtgatatacgaaggagtggtggatgtgccatttcgagaatgggtgggggagggaagcggaagaaaaggggatgagggggggggggacaagacaagcctcgttttccggaagcatagtccctgtcagtgacatctctttccccgccccctttctcaacaaaaacgtatccaacgggaggataagagaggaaaggggggacgcggggggggcagaatatgcgggtaatttgagtcttgttacacgattacagggtagacaaggggagcacaaaggtaggtaggggttcccccggtcaaataaacaacagagacatttttttccttgcctctgtttttgttttattttggggaccgggggcttggcttctctcattggagaggatttgattttgggggtttcttccctggtccctacaggcataatctgagaaacaactgtgtatgggtgtgggtgtgggcgggtaggcaaggtggagggaaggaccatccacagtgaagtaggaggaggggaaaaacggcgatttgcagcgatgaagaggttgggttcggatcatggagccacaagagggattaccagatctgtggaacgtagcaattagacatgagcacaaacacgcaaattcgatttttggggagaggtgagctggttggatagggtagataggcgggctgggagagacagaagaatagagaaatgggtcaggtcaataatgaacaaggcagggcctgatgggggcgggaaatatgggaggaatggttcaagcttattaagatgctgtggaactgatgactcagtgcctaggaggtgaggctgaggagtttatattgcggttatttgtttgctacctaggtactttgaaatcaagttaccaaaattcccacgcgtctttcgttttggaatggggctcccatgttgttggtgttgataccagggtggcagtaaaggcataggtaataaacaatactgtgtggtgatgttgctgataatgaggcagatgcctgactacgcaacccggagacggagatgaagatggtagatatctcctagccatcttgccattatcgatggaccttaccaacagcgtaagtgaagtcacataattgccacttctgcgggcggaaaggtttccttcgcggggtgtcattccgaacctttccctcctcgcttgatgatcactagatggagatatggacgagtaaccatggaatcttactgagcagacgtatgtggatagcctcatgaatgaagatacgtggatggaatagacaaggctccatctcacctcatcttatatacacgactcctatctttactgcccgtttcaccgcttggctgaattatgatatcataatgcgggatgtgtgtcgatcttcaacagtaattcaggcttcagtactgatgtccaaggctgtgcttatgccatacccacctcctggatttgtggccggtggtcggaagctatcccggattatttcgactggcggctcggaaggtacggcggataacgcggcccggggatgtcagttggggaagagcaaagattgaaacaaaggcacgatgggaacaagacgggatggcgtcttaccggaccccagatgtgcgggtcatagcactgccttatgggcattaccgaagccactgagaagcttatcctctctgtaggttcttttgtaaaacgcagatttctttgcgaggtgagcgtacgtgtgaggcttgaggtgcggtggcaagtcttggtgactcgctgagtgagcacctgcttagtcgtagatagcctcgtgggctgttgctgttctgcggtcggctcagagtcatgatatcatctatcattccttgtttggagagctttaccaggtgtgcttgcgtatgtttgattccatcagccaacgtttcaaattctcaactgattcttggagtcggggtcaacttctgtcaggcatgaatgagacaaaaatgcgcgatgaaggaatatggcaatcttcattcgagatgggaacatgataagaggtgacctcggggtggggctctacatgctcgcgacgcgaggccgaaccacagtctagagaaagatggttgaaaacggctgtggcttgccactgctggttcctggtgagtggtgtggcggagatagggctgaccgcatggccttacatgatatggcatgtggttcagaaagacataagctgcagatcatgaaactctgagcagttcttctgagtatagatacatatgagcgagatcggatgacgatcatgtgaaaattcagagatgcgagatcaatccgcgggtgagatcgggcgcatgtgagaagcaagttgtaaccttagatcgactgacagattgttgtcattcgacgtcgatatgaggattgtttacgacattcaattgagaaaggtagtcgcttgtagaatgggtgataaggttacacagcagataagctgccattggtgagaggagttctcttttgacttatactttgcacgtggctcaggaaggtcaacagcacgtgcaagtcacgaggatccgagtgtcttgagtcggccatcggtaggtaccgataggttggcccgtgttggtttcatgttgttactcacacttgtccatcttaatcgacaactagacaaggaaaccaatgatttggtatcgggggatgtgcttcatcgctggacacaacagaagaattcgtcatgtctcctccttgaccgcccgtctccgtgatgctcagctctgaccagtatttcatacccgacgccgactggaatcaagcatacgagcccaccgggtctcgaggtaagcgagacgaggcagagcggaggtgaagcaaaggatgcatgtacggaggccgcgatcttttgtgatatgtactcccggaggcctaccgcattaccgtacatgtccgtcacttgagatctgaactcatcgagtaatggaaagaagaggttacggcggtcggtcggttcacggttagctcggggggtgacgcatcactggatggccttattgttgcccagacggctggacggggttgaggtggatagggcgacattccctgacatctcgacatctcactcacatgtcttatcatctcgcattttgaaaagtgtcaaaacttccagattgggcgtttgccagacagcagatacaggctatggtgtcgatgcttacctacccgctgaccgtggaggcggcgcggttcgattgatcgctgggtggatgagacctcgtgagcaacaactgccgtgaaacgcatgcaaccaaacacatcaaacatctggaagcctcgcaaatactaggatacgtataccacccaacatcgaagacagatccccgccgaagaattaccgccgaagcgattgtgctactgtcgcctcctgctcgagatggttgcagttcaggtagcaacaagtcagccacgccaagcacattcattcaccgcctccagtgaaagtacacagcgaaatacgatctcggtctgcaaaatcaccatttgcgtgcctctatcagctgcgatgtgcttcctatcaacttcctaaatacgaaataagaaataaacccgtgcaaaagagaagagatactcatttggcagtgtccgagaaatcacgggatgtggttgaccgccactatcacgacttgcaaaatcccctattggctttggcgtaacaccaaggaccatggtgatggtgtcattgatggataagggttgttgattcgagatttctcttggagaatgcttgaaggagcgaatcacaagctggtatttggggggttatagagaggcctcaaaacgccatgatcgcccccaacatcacaccgaaattacgcaatccaaccaaattccaacttcgctgactggcttgatctagacctccacaacgtggtcttcaacctcagaatttcttcttttggcaccctccagtctacttcactcgaaccttgcatagaggcaaagacgctattgaaggcgttcgattgcttgcaggatcgagggctaagatcgtgcgttgtggtgacgatgtgttttgtagggctgatggctgctacgataaatgcaaagaaccagtgaggtatcccttaacaaatatgacaataagagggaattattcagcagtagaattgaaacctcgtgtactaatgtctatgtctgttacttgaattgattgatagatgcatgttgagccccgttgtcgtcattgaatccttaactaggtattatctctattggtactagctaggtactataggtcaataaacaaggtagtgtgctgataccccaagacacgacagctcgcggatgccgaactcatcttacgtggatagcctagaatataccatcatctcgctcgcccggaccaacctcattgggtgttttgtccgttttagaatgaggttgggaggctgtgtacctattagaggaacaaacgaggccagtccggggctccgtggcgaattgtaggtcgatttgaaatcaaaaacaaaaataactgcccgatttggagccaacagatgcaattcaagcaaaagcacaagcaccacccggagagttttgagattacatattcagcagattgtgacaatagattcactaatgggcccagaacggtgttgtatttgaattcaagttacctactcagattaacaaatacactgcactgtggagacataccactccaaccttccgtgagaaattagtatcaaaacacctctgacatttctcagcatctcaacactcaacacgcagcatattccctcaacattcagcctagtgctatgagcaggtacaatacgccctcagtgctcatcaagaacaaaacatcaaacacactttaagcatcccaagaaacatcatcatagtatcaaccaaactaaaaaggactatttcatttcaatctgaatcatctatgaataaaacctgcgtttccaggcacgcactcgacgcagcataatagccacatttgtccacctcttcataagtatacagccaaattcatccgccgtcaacgttggacgaaaacgacaagagagcattggcacgatctataacaaaaaaaacaacccaaaactgaaccaacaaactaacaaagagataaaataacactaaccgagagaaaagacccttcacgcaatgttaacaaaagaccaaaatattagagaaaaacggaaaagactttgacctccagttgacacttccaaggaaagagatgagataaccaaaaggagattgacaatcgttaactatacttgtgacagatataaatcagcagtctctgactgtaccaaaccaaaaaaaaaaccatttcatccaaagacagtaacacataaaaatgacaccccatgataaaacaaaatgaatccgaccgcccccaccgaacctgtacatgagttgttcctccccccaaaggagagactaaaagaggaagaaaagcgaaacaaactagtacccagcaccctctcattaataggaatcctcgtctttcccgtccattacacacacatcttcgtttttattgactaccctctcctctcacatgttcgtatgactgttgtttacaaaagcacttcgcggatgaagcttccgagttgcttggcctgtgtcaacggtgtggttagttggatgctgaaatgcaaggaggaaacaaaagacatacctgatcatcatgcatcatcgagaagtggttccctggcatgtgtctgaactgcatcttgttcacatccaagtactcgtcccacctgttgggaccaaagtctgtccggttgtccaacaggaagagggcgtgtcccttggggtatggttctggtcgggggtcggtgggcagcttgcacacaccgtcctcgcaccagatggtcgtcaccttgggacatttctccttgggaatgggctccgcgtcgtagttgctcagtgccgaaacactggcagcgaagtggggcaggagccaaggggggatcttcttgtcgtcgccgtcaccgaggaggccgatggaggcgaaccaagcgtggagtccctcggggaggggctcgatggtgacggggcaaggagcatcgataatgatcaggtgctcaacctcgtcaccagccttgaccagctgggagacgatctcgtaggcgatgacaccacctgcggaccaaccggcaagggagtatgggccctgcggctgacgacgcttcatctcctcaatgaacttggaggccatgccatagacaccgcacttgtattcctcaggggtcttcatgaatggggagaagagaccccagacagcccagtcacctcccacgtcggcgatctcagtgtaagatgtagcggaaccggagccatcaggaatcatgaagagatgcttcgtggcggtgcggtggctgcctgagagaagaaccgaggaagccttgcggtttgggtagtcatcgacaatgttggtaggtctgggaggcttgggagggcagggctgctcattgccaatgcgggggtgctgagcggtcttgggagcgggagcctgctgctttgactgcttaggggcagcagggcgaggcttgggggcatcaacgatgcccaaggcacgctcaacatccttgagagatgggttggagacaaagagatcagatgggatcgtcagaccggtcttctcacggagtgtaccgaggatagacaagctcatcaacgagtccatgccaaggttggcaaggtcgggggcagcgaggatctcgtcaacctcgacctgcatctcaccagcaatggtgttgcgaacgatgctctgaagctcgctgctagaggacccagactcgttcttcagaccatcacccttgagagagtctgtctcactctcatcaagaggagtggtgacgttggagtcggaatcaatctcaggtgactcatcatcagagttgtcggattcgctggaagagatgctcgcctggacgccagacttctcaaattgagccaagtagatcttgaagacgccaatagtggggtggtcaacaaaggcattggagtgaagatccaggtccatctcctcacggatgcgaccgctgacagtcaaggacatcagagagtcaacaccaagatctgtgaaggcgatgttgtcggcaagctcatcgtggctgcagccgacctccttggcaaggatatccatgacctgggagacaacacccttgagcttctggttcaccttgccaatgttggcgggggtgacagtctccttcttcttcttggcgggagcagccttgaccggggcagccttggccgcaggagcagcacgggcaggtccgctggaaatagcagtgccgcgaggaggcaacatcatgttgaggaccttgcgagggattgcttggaatttgatgtcacccgtgataccgatgaccttgtcgccgtcgaaaacgtaggcatcaccggcatacatcttggagcccttgatgggctgcatgcggatgtagctgcgatactccttgttggcctgaggaacctcggtgaacctcatcgaaccccaaccgtgagagatgaacacctgctcacgtgagtcgacggcgtcagttccgttgatgatgaaaccggagatgtggcaagaactgtcgatgtggtacgggctgaaaacgtagttgccatcctccggcgtagtctggaagcggattttggcagtagcctcgcaagtcttgctgtccaaaatgacctcctccatgccctgatatctgcggttgtagtcgacaagagcaccgaagagcttgtaagcaagcccgcggccaatcttggaagcctcaccacgctgctcagccgccttgagtgagtcgatgcgggtcttaatcaagtaggcaacacggtcaaactcgttctgccagtcctcgagctcaccgaagtagaccttgcagatagcatggtcggttctcttggcgccatcaccagtgtggaagacaacgtcggcctggccggtcctagcattggcgttgatagtcatgcgcagtatgtggctctttgcggtgtcgttgaagatcaacgtcttgggaacttccatgtgtgccacattggtgccgattttttcggtcccgggccgtaccagcttgtaagcgtactggcatgcggtcatggccatgtcgccatagagcgaagatgggcacagaggagcaccgttgaccaagtgaccagagaccacgttgcgaagctctggttggcaaagatcggactcggtctcgaggatgacaacgtcgccgttgacctcctccttggtgatcttctgaacggtcgtggtggacagcttgggcttgggggcctcgatggccttgggaccagcctgggttccgacgcggttcttggacaagcaccagtcgccagtgtactgcagccagtagttcttctcatcgaacgagtagctgggcaaatcaagcaggcgaaccgattcgctgaagtcacggtggaactcgttgaagtcgacgtttagaccagcggtgtgcagagtgcacaagctggaggacagagtcctgtagcaaccctcgttgcgacgaagagtcgggaccgcaatggtggcaacgccgaaagaagccttgaccataccagccaacactgggtgagggccaacctcgagccagacagtcttctcgtcaatggcaccagactgctgagcagaaaccaggccaccgagaaagttgacggcctcacgggcatggttgcgaagatagccaggcgtgatgggctcgttctcgaccatcttgccaagaaggggcgaaatgatgggcaccttgggggtgttgaactgtacagacttggcgagcttctcaaagtcgtccaggatggcgtcaacctgggccgagtggaaggcgaagggcacacggagctgagtgcacttgaagccggcgccggtgaggtgttgggcaatctcagccatctcgctagactcgccgctgagaacagtctcgcgagggccattgatgcaggcgacattgacaccagtggccttcacaccaagagcgtccatgatggtctcgacagagcccatggtggcaagcatagcatgggtgccggcggtgcacttctcaacaaggagctgggcacgcgcgccgacgaggtagatggcatcactggcggaaagaacaccagccacctcgagagcagcatactcacccagactgtggccaaggaccacagcagggcggataccccaagatatccacaagcgggcaagagccatctcgaagcaggccaggccaagctgcacaaccactggagacagcttggagacatcagactcgctgccgtcaatcaggggcaagaatgatgggaagccatggatctgagcaatgcggtcaaactcgtcaatgttctgacggaagaccgagtagtgctcatagaactctttgccgagggcggggtagtgagatccctggccagtgaacatgaaggcaaccttgggttgctcagggagaacagggacgaagttctccttgaggcgggtagaaatggccgacttcgcctcgtcgaggtcactggcaacgacgttcatgcgccagtagtgctgaatctttctggcagtggtggtgtaggccacatgagacagcggcgtctcggggttcctctccatccagccaacgaggcgttccgcattacggatcatggcagcctttgacttgccggtgagggtgacaacgtggtggctgcggggatcggcggtggccttggggcgctgaggcgcatcttcaagaagcaagccagtgttaccgccagcggcactgaagttgttgatgaagacgcgtctgggcttgccatcctttcttctgaagggggtggtgtggaaggcaatgttgacgttgcgctcagacaaatccttggggaaagtcttgttgatgacggagccctgcttgatacccacgtggggtgggatggcattcttttggagcatcatgagcaccttgcacagagcagtcacaccagaagcagcctctccgtgaccgacattggccttgacggcaccgagatagagaggtctgttggcaggtctcttgcgctctgcgggggcaaagacattggtgacagacaccatctcggtaccatcgccagcttgagtgccggttccgtgcatttcaacatagtcgacatcaaggggatccacaccagcctcgtcaagaatctggcgagaaaggacagactgcgtcggtccgtgaggatgagtgatggagatggcatcagcagagtggttggtggccgtacccaagatgacagcaaggattctgtcaccctcagcttcggcatcctccaaacgcttgacgaccacagaggcgcaaccgtcaccacggcagtagccgtcagcctcgttgtcgaaagtagcgcaaggtcccttcttggacaggaattgtcctctgctgagaccggagaaaatgtccgggttggtcatgcacgacaacccaccgacaatggcagtgtcacagtcccgagcccacagagaggagcaagcgacgttcatagccgcggcactggacgaacaggcagtatcaatgttgagactgggtccgctgaaaccaaagtggtagttgatgcgtccggggccgaaagcacgcacaccacccgtgatgtagtaggtgtcgacctcctgggccgcattcagttcacgccagtcatcagatgtctggccgtaaaaggtgccgatgcggtcaaggcgggtagttggcgtccggttcggcacataaccagacatctcgagagcttcataggccgtggtcaaggccatgcgctgcatgggatcggtctggagcgcttcacggggcgacatgttgaaaaaccgagggtcgaaaaacccggggttctcaatccagcagccatagggcgtgtgactggtgttcatgatctttccggtgggatcatagtgagacttgacatcaaagcgatccgccgggaccacacggtggacatccaggcccttctccaacagctcccagagcttctcgtggctggcagcatcagggaagcgacctgccatgccgacaatggccaacttgcaccttcccaccgacccatggttcccgattgtcgaggacgtgctctccggtgacacagcaggcggcttgcggagaatgacctccaagtctgtctgagacttgagaagattcgcgagcgtcgcggcattttgagtgggacccagcggcaaaatgagacagctatctcccttgaactggcgcgcccgctcgagacacccgtcgaggaccttgttaaacatcagagtctcattgagaatttcaaacacgactgatttgatcagcgtccgcgtatccgtcgccgcgaaccaagtccccgatgtgcatgacataaccgccgaccgtggccgagtgttgtagaaggcatcgaccacttccggatcatctaaatgcagaatcttgtcgatgttggcggaggcgtgtagatgagcggcatgatacgggccgtagactggaatcgacgtcggcttggctgacagcctgcccttggcaaccaagagtctgagcgtggtgggcggcccagaaatggcgaggctgctggcggaggcggcactgacataggcacggctcgcctggggaatgccctgatacaggttgtcagttggcatgcacagaatgagacactgagtgagactgtttacacttacattttcgcgatggaagctctcgagggcagccgtggcatcgtcctccttgagccctgggaagatgtatgtccagctctctgattgctcattggcaggacataatcggtctcccagtgtgtgaacgtacgacccagtcctgaaggcgagaaggacagcctggacggccacaggtaccaaggctgacagggatggtgtcgatgcaatggcagaggcggcaaacagcccagagcagagaccgacaaggtgggtgctatcatgccgggtcacatcctcgaagttcttctctgcgtggctgtagtggtactgtggttagcttcaacggtgtgcggtgcaaccccagagagggggtttgagggtggatcgccgggggggggggcagtctcactcgatgtagtgtgccagttgagatatacacaacaacgccccatcgattcctgggtgcttgagcttctgggcgtagtatctctcgtttagttgctgaagagttcggaaaatcggcagtcgtgatcgttccactcgaggcaacttctcaacttccttcctcaattcgtgcccggcttgctccaagaaggcctttgcgagtataccctgtttctcctggcgaaaaaactcggcgaggaagccgtgggtatcaagagactggtctccgaagagaaggaatgccaacttgtcagccatcttggaagcctgttgacggttgtgattattatggggtgagtggatgatccaggaagttgggtccgggagggagctaccacggtcttattatatgaacgagaccggaaacgtagggcaggatcctcagagacaaaaatgatactagatctgcctgccatgtgagaaggctcagcaccggcgtcgagagtcaactccaagcagggggaggggtgcgaggtgtggcgacaacaaagaacggtagccacaccccctattctgctgcaccatccaatccacgatcctttttgccggtgggataagcccagtgtccggtgttgctaagtttcggtgaccgaagactcattgatagtcttggggtttcccctttggggcggccctcgataggcaaacgatgggtacctcgactcgggacaccggctcgatagccaccgcacttgggcctgaagaaacgccattgtcatgtagcgggactctccaacgcaagggtcatggtgctaagatggggccggggcttttgtcatgaccaacacagacagctgaggatgccgtgggaggacggagggccagaaacggcccttgccggcaaccactgcgaaagccaggctccaccagtccaacggttcctgaacggacagcaggaacagggttatcggatagcacgccagccctgcacttgcaggccccatcagtaccccctagccagcggccacactagctctgctggtaagggatatgcagcgacgtaaactcagaagcgagaggcaaggacaaagcgtcgaagccaaaacagaccatgttcaacggcgtcgatgatacggcacccgctagtggcccgagagggtcccgccctttgctgatcgtcatggctggcaaggagttttgcagtggccggccgctgagcctatcgttcatcggactatggtgacggactcccccacgacacccacggcgcgcacgacccgaccatacacagtacacaaaaattgctgaaaagcggctcgcagtttcccctttgcagcaaatcgtgcctgatttagccgcgggtccctggcggatcaggccaccgctcatggtgctgtcaaatcgccctcaggagagccgtggtgaggatggttgcggacaacaaggcatgtagttaccgccagctgacaaggggtgggagcctcatcggccgtaggtggcataaccggcgattgcaactctccacggcatcccataggtccatatcatcccaccagctagttgctgcagctgtcaagcagacggacacatagatcgaccgccggatcggttgcggcagcagaacggaattcaacacaatactgccgcgggaaacttccagagcgacggcagggtcagggcagacatgacgttgtgccgaaaacgaccaggcagatcaagcttcgaccccaggtctggcaaggtagcatcagcggcctcaaactcgctcattgtgcttgtgtcgccgttgccgtggccatcgacaggaacgagaatgcaagataggagcacacttgatgctggctcgcacgggtccaactgatcccgacacacctgtcatgtacacggcatgatatcgaaaacctgaagtctgctcctgctcctctaattgtgcacccactgcgagacgcgcctgcaaggttgtcaagggctgcaatggttccagcagacagccggatgaggggaggtcagatgagagacatcaaattccaacacccgcccacgccactgggcggatcgacggcgaccatgtccgcacacgacgatatgatcttaacggttggttcgcgatcgagatgccgcatgtaggcgactgctgctgttggttgccggcccaggacccagtatattggcactgattttcgacatgctgaacacaaccaattctgtctttctctctctcctctagccccattaactggaaggatggatggatgtcctgcgtctcaggtacagcagcacagccgaacagctggtccgtgattctccagggaagaagcatgttttcttcaaggcacacagcgagggcctcagcaaacgacagggccatcctggcaaacgggccctgggtcttgattcaaagcccacagcctcgcgagggacgggggaacgagggggtgtcgataacaggcctggaacggtcaaactagcttggtagttggccagaaaatggcgttcagatgaaggtgtagcgtagctggcctggtgcaagcctccgagaccggtccaggcaggtagctaggtgtgtgtgtgcgttcggtatgcatcgaacaatttggccgatggttgccgctgaggtctctggcttggctcttccgtgatctcggcccgttgtttggtgttgacattcggaaacggaatgagggagcgctgtgatgagcattgggcggtgggttgaatcgtgacgcactgctcgaagcttctcattgatggagagcacgcattcgggctctaggttcccgccaagaatcttttgctggggaaaaagcggggacgcctttcggtagctgccggaacatctccaccactcagctccacagttgaagattggacgcccaccgataaccctgaagtcctgtaagcccctaaccctgctctatttggaatcaccaaagcaacacaggatgaacacagaacacagaacacacacagagcaggagcacatggcaaaagctcaaccactggaaaggtatcacgacaactggactgtatacagcttacgttgcccctcacctcacgtcatcgccacagttttgggtggtggtatctgagggctcgcagccttgttccaggcctggattacatcagctcaacggctgagcgcctcctcccatcttctgcaagaaacggcgatcgacagaacgcccgagacgggccagtttcttcttccaaatctaccatctcaacggtcactgctcatcagtgctcgcaccgggaggtcagacccttcgtatctacgagctttatctccttccagccttcccgttcagagtcgccgtgttgtgctcaccgggcattgtccccgccccgaggaagcccggaaaccagctcccggccgtccgcttatcgaaaccttctcatcgacgtccagtcttacggcgcggctgtctgtggccagtctagcggaaataaccggtcgctgttcccaatgtcatcatgcagccaccaccacaccaccaccacaccaccaccacaccaccaccaccggactccgggtttcgcttcgcccgtcagccgctgtgccgttgctcttaaccaacagatacccttgtccggccatgctccccagatcaataccagatttgccaagacaccaccaggcgattgtgttccataaccagacccatgggactgcattcagtcatatttgtaccttcggcatgctatatgctgttcgatgagatcactcggtactcatcaggggcaaccgcatattagagcaagatgaagcactttgctttgtcgatgcgcttgctagcccgtcgtgcttttaggtccatggccatacacacaacatgacaaagttccgtgagacagcttcaatgccaaatgtcattgctggctgggttcagcttccatatgcacccaagagctgtgcggttcggggcttgcgcaaagctgggtgctctgtacgaccctcggccaacctcttttttgccagacatcatgttctacttctcttcgctttccatcttcgcaagccctccttctttgaggctgtcagtattttcgcgccgacgtggtaccggcacttgctggtcctgtcatgagcaaacactgagtcattttcagccagcatctgtcgtcctccccagccggaactcgggcggcctttcctcaagccacaggtggcacagaaagcgataaccacatccccaagtgaacaaaaagctggctacattctcatggccatctcttggatctctgctgatggctatgtgcaagtgttcccgaacaagaccagatcaccggtatcgatggcatgaccaaagatagcatacggatggccatcggcattccggaacatatcccgatctccatgcggctggctgcgctcaaaagacttggggaagcacgtcaacgtggatgtcggttagaggttgaagatactaaacatgtaagacaggttgatatcaattttcttctatccgacggggaagcctgtcaacccgttgtttgtgtgacaccgcagtctccggatttgtgatggcattatcagagaaggttgaggccctcgcatggtgaatgcccagccctagtcaatgctctctaggtactcaccgttcgggttcatgggatgctgtattatgaagctgtgtacaccaggaacatcccaaaattagactttaccaaagtatgccgtccaccgctcactacattctctgacggcatgaaacactacatatcatatcaggaatgtctcttagtggagcccactaccactccatttcataggtttcttgagctttcggtaccagtgatatcctccaaccatggtcttatccacgaatcggagggaacatgtgctttttgcagggtttacgcagatatacactccccgagacgtacaggttagccatctgagtggttgtccccgtacctggcggcccgtcttcggttgcttatcgaccgaaatatccgggtatgagggttgttggcatttgccatcccagaggctctctaataccatatccgacgaaaccgtggcacttacacaggctctgatggataagcatcacaagaagtcagagtccgcggagaaaagtccgtagtcttctatctactgttcctcttttcggacctgaaacgcagggattttgaccgagtctcgcctatacggtttgtcattcctggcgaagacatctctccacaccgcggtgaagaataccacgggaggaggggtgtgcaagcgggttcttttatgcaaagctgatcccttcccttcgagtccgattgcagggaaccataaagcgcactcgcgtgggggactgcgtgatgtcgtggttggctgctcagcaggacagtaatattgacagtagccgggcaactagatattgcaaccctgggctgaaatgctgtgcacacttgcttgatatcagacaaggaatacttcacgaaactcgacaccatcttcaccgccgcttgccagtggctttccgtgcatcggaaccggagtgaagagacgaaagccaggctctcataaatagggaggcaggcttcaaacaatgaggctatgtttcctgaccatgatcccgcttctcttgctgatcagcactaaaccccacaatgtctctcccttgggtcttgtggatctttcctcttcccgttctctcctccgctccctttcttggccatctctttatctgtgaccacagagactttccttcagttcatgtagagcaatcacattgcttgcagctcgtattctcacttcattccataaaaccaacgaagatctttagtcaatgtaagtcagtgttttcatgtgattctctttcccttgatcatttgggcacagttttcgttaccaaatatcatgggagaagagaactgttctagaaagccggcatatgcaagatattctagacatctagatctcgtatagtagcaaactgcaacagctaacaatgccattcatatcaggttcatccaaggcaacaccagtgcaaagtctcaatgtcaactcaacctctacagccgagtctttcaccagcccttcatcttcatcacccctacctacacctcaaaactgttcgccttccctaggtaatttcacttacaacaagttgctgctcattggcgcaacctgcaacttgcaccattctcaactcatttaagctcactcgccttcaagtatggaaactcaaaactcactcaccctcccaaaacagccacccacacgagcaactttcatcacttcatcccgcacgttctcatctccatctcaatcaaagtgagccctgacttttcatccaaacttcattctctattcattctatctcttttaaaaacactaccttatcgtcattaacactcaacccctacatgaaatactctctcatctcgcaacaaaagccagccattaatccgccaccaaatacatcaccatgccccgaaatccccgaatcaaaaaacacaacaacaattttattttaacacatcggaggtattaggggcacctaataaaaacagcagtttgcgccccaaccccatacagaaaggcagaaacaaatggaatctcctttcctcctccctccaatccaacaacgacaaaagaaaaaagaaaaggctcaaatccaaaagagcctaaaacccaatccaaaaaaccacaaaagaaaaagcccaaatccatcaaagccaaaaaaagatccatggtatcatcccccatctccaacccgccctccatgcccgagtcggcatccctcgtccctccaaatcaatacttagtccacttcctagaagaagaaactccccatccctgaggcaagcttccccatcaaccccctcttcttgctgctagacccagcatacatagccccgttataaatagtcggcggcaccgtcaccatccccgtggtatccaaataatcctgcgtattgcccgccgcgttgccactcaccgggatgcccatcttgttgcaagcatccagatgatcctgagggaaggtcagatttctcagcctgtccggcgcctcaatgatggtggccgtcaggcccatctcgacatgccactcaatgtggcaatggaacagccaagtgcccgggttggtggccttgaaccgcaagacggcgtgcgagtgcgccatgaccgtgacggtgtcgcgccggggcggcttctggttgtagttggtgtccctgccggaccagtccccggtgccggtcttggggcggtcgagaacctggaagtgatggccgtggagatggaaagggtgggtggcagcatcctggttgttgaccacgatctggacgacatcgccgtagttgacaatgaaggggttgatctggccgtagacgatgggattgctgttgtcgtcgcccgtggtggcggccgagtacaaggccggcaccttttggtcgatgtatgtcaggttgttgaagcaagcgcgggggtagccgttggcatctgtgcagaatgcgaagtccatcttgatcagagtgtcatagttggtgtcgttccccccgaggatcgcctcgttgtcatatggcttgaagtgggagtcgtcagcaggcttccacttgtgcaccacgtccttcttggtgtttggtttgttgtaatccatggtgaggtagccggtgtagttgtgtggccattggaggggacccaagtcgggatttgtccagtcgcggttgatatccagcgagatcaagaatgggtagttgtcgttgtctcgatcaatgcactcgattatgaagtcgtaacgctgagccgtggcaatgcggagctgatacttgacctccttttgcagatagtcggcgtcattcatgatgatgttaatgtcgtgagaatcgaagtgaatcatggcggaagccaaggcggcgaagctgatcatgcggaagcgatacttcctgcctttggtgaagttgacattcaacccagctccctcgttgatgatcatgccatcgggaatgggcggagcgaatcgagtattgctaggctgcagcatgttgcggaccatggtaagagactcattgtggtacctgtcacttgttaagttgagcctcacaaccaatggatggtaagcaactcaccaatcagaaaccgtcaagataacctcttcatcgtacgagccggcataggggtcattaggatcgtgaacaaggaaaactccgcgcaggccgtcggggtattgacccatgttgtgcgagtgatctaaatgttgttctcagcaaatgtcgctttgcatagcggtcgagccaaacttacaccaaaaggtaccgccgacatcaaccacgaatttatactggagagtcgagccgggaggtactgggcactgggtaacaccgcttggcccatccatctcgggagtctgaacctggttgatgccgtggaaatggagaccacttgtctgattcccgagattgttagtgaagttgatgatcacggtatcaccgaccgtggcatcaatctgtggacaaggccaagcattgttgatgccgaccactggcctcccaactccatctggggctgcccagacccaggttgccgtccagtcataggtaacagtagctgctttgaccgccgtggcgaaagacagagccgcaagcgatagaacaccagacgacttcatggtcacctgttactgctctccagtaaaatctcgttgacaccttgaccacgatctggccgatggcaggtgcgagggtaacgaatgagggtgaataagtattaaaaattaaagaggtgaaggggggaggaggaggaggagagccagaggagaaagcaaccgaatgctcggttgaggaggtgtcggatgatccaaaggaaagatagaaccctcgagagtgggaaacgaggccattatatcgaccggccacgagatagcgcgaaggcgagaacggaaatgcaaggccgcatggtgcacctaccgcaacaggacactaggccatcgtgaggatcgcccaaccagtgctcgggtgccaagcgccttctcctagtccagtatcgcgggttttcgctaacccccggaccatacactccaaacagggggggggggggggggagaggctgagggatccatcaatggccgaagatgttggggagcagaatacgaagctagtatcgattgtctgtgttctcttggtattgatgagtggcttcttggccaaagttccgtttctgacgactgtttgatgctgattaggtcgtcaactgggctgatggtctctatggctgcagatacaagatgagaaggcgtggcaaaggcggcgagctggtgtggagaagtggaagctgggtccaaccgctgccacggaatagcgaagatgccgcggcatcagagaaacagaaacaggacacgggtgggcgcgttttggccgcctcgagcttgtggggagttgggtttgggctagcgggctggtgcatcttcctcatgcatgtaggcaagcccggccacggaaagaacaaaagaattcctgtaatcttccaaattgggcgtccttgacgcagccatcgaagcaagggggtcggtatcagtcgaaaccatcactgctggaacaacaggcacaagttcccacagaaagcgtaaacctagagctgatattttcggtgttgtttccacctgttcctcctcgagtaatcatcagggcgcaagctaacaacaataacaacaccaccacccacacccagctcgcaaaacagtaatccgaatcccgagcaaaaggtctcactaacaacgtacaacggtcaaatcggcacccgtcatggggagactgaatgcggctaacggcggttagcccccttggactcgatccgctcagccgctggcataaggtccagcacaaagggtatcgaggacgcagtgggaggcaaccgctcaaccaccaaagttcaatgcgcagatgttgccggtaaaggttcgccgtgtaactgccagacatggcataatggctgcgtctctcacctgacccttggaagtcatgatggaggtgtggcaacgcaactttcgatagttgttcgctgtgtgaaacctgggctgagcggtggactcggcccagaccctgaacgtcactcgaagttcaatgaagccctcctgaagaaacagatcggcgcaaccacgagggtgaaaaggcgggaaaacaaaacacctagcgttggtgttgcggaagagcggctctcaccgacacctacatcccggatctccaagtcggctgtgacctccatcgtcatctcccctatcaagccattgaagctgtttgacggtcaactattgccaataagaatccttcatgcggcttgtgccttgacaggtgtaacaagactcgagaagctgtgttcgaggggagagatcaagagccgtcttggcagaggaagttgaaagaagcgcgtggggagtggggcttggtggagcccgctaccgctaggaccaggggcttttagcagggtccagcggggcgttgattgccggaaatagcgcgaggcgctggtgatctgcagatgggatgttttcttttccacttacatcttggctcgagcagcagctctggtttgctccctgcgtaccccaaccctcccgtcccggcttgtctggctgccttggcaaccctccttgaccgctccaacggcgtcggccctcgagccgacaggatggtggtcttcggtcttaagtgcgtgctgcgagatggagccaccaagagagccggccttaggtgctcagcttccagtctttggatgccccgagatcgccgaagctttgttaccgccggtcccgagcccataatttgcaatccttcatttcctggtttccctcacggcttccaagtcgctttggtcttctttttctcggggcttctttctctcctgaactgtggcttgggcaactgcctgtggcagccagttctgctcgcagtggtgcgcgccggtcgccaatggcatgatggggtctttcttatttcccgatgatggcgttttggggcgtcctccatcctgcccagggtttatgggtggtgatgagggtgtgttgctgactttgttgtatgctccttttctgcgagagctcggtcttgggctgagatgtgtctgggatacgtgagatacgtgggccacttcccggccgagctcggtgattctgtcagttctgtcagataggcctcgcagctggctgcagcagccaagcagtgcaccgcattttcgtcgacctcaactcgcccagttacgttcatggtcgcacttttgggtaggatatgtcctatctggaacaatcgaaggctggataacatcaagtggaagcaaagtagatccttcaccaccccgggtgtgcactgactgagtaatagccgctgccagcaggacatacccgcatgttgaaatacgagaggcactcaatttgtgaactttgagtacgagaatgggatttgcaagcgacgagttgcccgtgtttcaagtgggatgaaaggatgcgtctctccgtctcatgaccttctcattatcggaacgagaattggatccttggtcatacccatccttgatacggccagccctaggggaattaaaggcgtgctcggtctacaagctcatcctcggatgaaatatctcaccaattacccgaggggaaccttccgagtcctaaagacggtgtggatgacgaacgaggatccggcagaaagcctgccaagaaccggcaacatattggtgggtaacacacgatgctgaatggaaaagctcgagacctgcccctgcaaggtgctaacttcacatttcacaggcaacactctcacaatatgtcccgtcgctccatcatgttcaactatcatatcccttagtgtcaaataggtaggtaggtatacctcacaacacagtcttctgctcgttttcgtggttagaatacgcttcacatggaccagacgtactcggagcacatgctccttgtcacacaagagctcagtcaccttccctgctcaagggttatccccggcactttccgagttcccggaacgctgtaaacaacaattattgaacggctgaaggcatctgcaagattgctcaccaatatatttacaccacatgaacatcatagagccgtagctgcccgttattacatgcccataccacttggcataggacgctccacagcagtctaccttatcacatagccaagcattgctcatgatggaaaagcaaagtcatgattatcccaaacaagaacgtcacacacgccaaggagactatcactgaatatgagctctcttaaatttcctcatagatcctccaagtatagagcaggatctaatattcagggacaacaacgtttgtgtaacttcatgaacaaacacagtaccaacagcaatactactctctaggaactgaacacaagaaaaagaatttatgcagctctgacaactccatctcgcctgcagttaaactattgaacttgtgtgaagtataacaacagaagctgacaagcagcccaagaatccttgatgagatattgacatcttgactcctttttcgcgacaaaacctcaaagcaaagttgtctctgaactacgccgccaactaacacacttacccacatgtaaaaacgacgtccccctcctcctaaaagatggcgcgctaccgccagtagcacccaatagtctggattgtgcgtgtaaccatcctcctccggcagctgcaacagccacaagaccacaccatcatggcgcggatgaggctgaatccgtaagcgcttcacatatgttcaaccacaccacagccaacttcctactcgcaactacctgctcagagtcgaagataggtaatcatccataacgtcgtaaaaccatgacagtcttgctgaccatcatatgatgccgtcttcaaccactcatatacatacaatgacgcggaactgaatactatgtgcttttgcgtagctggcataggtagataacaacagcctcttctccttgctgtggcccatgtcgcttcatgcaaaattatcaactcatgatctaactcatcaccgagagcccattcggctctttggtgtgttttcggtaaaatggaagaaaaaactagaatgtgcactccctcactttcccggtcctcccagcttcatactcgatccacctggccacgcccttcttcccgctcacgagaatgctactcggattcatgacatgacagccctcgtaggtgacgcaaaatggtggagcggtcgtatcaaccagcaccaccgcggtcggaagcgggtagagatacagcggagaagtgtaatcccaatgaaccggcctgatcgactgtcggaatggagccagatagccctgatccagaatcgtcttgaccagttttcttgccgccaacacatcatacggcaccgcattcggatctgccaccggtgacggtcgttgctcctgctgctgctcatccccatccacctccatagcatccccattgtcctgcgttgccccagccatctccacatccccatccccctccgcctccttccccttcaacctcacattcgccctcctcagcctagccgagatgtcatccctaaacaccaccacctcacgaccaggcccaaacaaactcaaccgactcggattactagtccacaccgcctccccccccttcttctcccccgtcaatcccgcctcttggttcgccgccgcaaacgtcctcctcacccggctggtgaacaaccccggaaccccccttctcggcagcggcaccgccgcccctcccccaaaagccgaaacccacccgtcgttatcgccaggcacaaacacaaacgtagccgtggtcaacaaggtgggaaaatccgccagcgtcgacgccagcgcgtcaaagtactccttgtactctatactccccgcccctcccgtccccgtcgtagcccccccaccatggctggccatcaccccgcaactggtgaaattgccggtaatgataaagctcatcggtgtctccccttccccgtcggtggcatacaaactgagcacctttttcagggcttgcaaactcctcggttggtcaaggttgagttcaccgagtatcacgatccgtgatcgttgctggccggcgggttgctgtcgtagcagccgctgttccagttttctcatcttgctgccaatggcgcgttcactccctaccccgaggaaatcaatccatccgaatccacccccaatggtatgctcctcgtccccagccatgccatccagcccgctaacacccaaggtagcgcgccgtttctcacagggaggctgtccgatgaagaaaccttggaatcggcctcctatcgtgcctcctactcccgaactgccagacagtcccttgccgacggattcttcttcctcttcgtagatgccgtctaccaggacgatcatacctggtgtgaaccaggccgagtcatgggggattgctgctgcgtgagagaggtcaagggtgatggctccggttaggtcggatatggctagggcgccggtggggaggacgattagcatgcctagcaggaggtgagtggtgccatggcgacccaataagttggcgatgggggtgattttatgggagcggaaagaagcgttagaggatgagcgggaaaaggaggtgacggcagaggtttggaaggattcattcctcaacagacgttggtggatgatgtggtaacggttgcggaagctgtcagttttgtgagagggcggtgggaggaggcttggaggagttgttattctgaatgatgttaggcctaatgttgagatagggggtagaaagggggtcactcacctttcaaagtgcttcttggccacgttatacgtaaacctcggctgctcaaaagccgacacaaccttcaaccacctccttgcgtctttgcttccatcctcatcaagctcatcatcttccccgcccaacccgatacccgacataccaaaactagcctggctgtcctctcttgccaaactcgtagggcgcagccccaacctggtcttggagtggtctgcctcgtcacttgcttccagcatcaaactattctgccggctgaggccacctctctgaccattacctcccgtgataatcctcccaccgctcatatttccctccaaattcttcagtatatccttcagctctgggcttgcgccgtcaacaatcaccccgccattcctgttcttccaccccctggctacctcttccagcaccttctccgctagcccttcctctcgccatcctgacccgcagtgtcggccgataaaagaggctagttcttgtagagcggaggatgtaagagtcaaattgtgtttcttggtaaaagttctaaaggcaaggggtcggagcgtaggcgggggcaggataataggtaggattgcagctttggcgggcgctggtggttggaagggtcgcaaagggtgggcgggagttgcgaaagcaggcgaggaagacgggattgggttttctgctgctgcaacattcttccgagcaccgaagaaaggggcgggaggaggttttgggcgtttgcgcttttcggggctggtgttttcttggctttgtttctttttgagggactttgagggactggagacgatcatcattttgtcggtctgttttgtatgtcttctatactcgtactatcgcaggaaaataggtgtctggtatttgcagcagttcggtcgggtggtgtggtgctctggtctccagatactgcctggccactggaaacaaaagtcaggtcggaggacagggacaggaagcgcgttaattgaccctccagggtcgcgcgtctcagcgcgttttgcggggcacaatagcaacaggggtctatgagcagggttacgctgctggcggcaatcggagctcgagaaagcttcagcacaatgccgtcattgtcacattgcaaagctcgagagcttcattttcaaagactatctttcaaggctttagggatctgatcaattgcccaccatgatactgtcaacacgtctccaggtcccaagacagctcccccgtgtggtgcggggcatttcaaccctccctaacaactccaatatcgtacgcctgaaatcccaccatctttttcattaggtagggcagagctaacaaatctcatagaaagtcttccctcacccaactcaaccctcttcatatctcctcacattgctctccagagacccaccaacaccttcactcgccattggcaccactaccgctatcccacctacccccaggtccttccagcacaatcctaaatttctcaccgtattggatgaggtcctcaccaagcatgccatcaacgatcccggcttgaaagctcaagctcaggcttttgcctctcctggcggatttaccttcattcacaatccaggaaaaaaggataggggagctgggggtggcggtggtgcgagtgccgaaggcggtgctggtggagctggagttggtggatgggtgcatctgagcgatgcgagaaatcctcctgattttgggaggatagcttggtaggttccgttctcgttggcatgacagatatgtcgtggaattaacatgccagaacaggccagaggacatctttggaagtgtggaggtgaatgggaaaggtaaaattgttggcaactaccagccgagtgggacgtaccgaattgtgacgaatcagggaatgtgagttttcagttttccatcactacactcattggtaattgtggatgctgatcaaatgaacgcagtcttgggctgagtccatttcttcacgaaaggctcctagctaggcttcgcgaagaagagagcaaggagcaaaaataatgattctctggaggatgttagttgtgtacgataggttggcatacaaatttatacccagctttacttcgaagttgatgcacattttgatgttcatggttgaaagagtccaagcgattattacaaagactgggatttgtggaggactcgtatgaccagcccataaacctatcgacagagcaaagcaaaatagtagaatacaaatcattattggccgttgacccataccatttaccccaccgtttacccaccagaagcatatcagaaagcagatacattgaaagaatagcacaactgctgcagagccgtgcatcaataggaccaaagactatgccgagtctctactcattgtcctcctcgtcttcatcctcttcatcgtcttcctcctcctcgctcgtcacttcaatgttggactttttggccttcttggattcggtctttgtggcaggtttactgctactgccgccaactccagcaggaacatcgtccacctcgaccccctgcgagcgcaattcctcgttcaattgcgggatggccttgaggaaggctttgtattggtcaatagagagcgagataccctatcattatgtcagatgactctcatggcaaaaacaaatttgtgacgcctacctttttaccaggcctcaactcgccatccggtgtggtgtagtactctcgaagattaaccagagtggcattcttgaactttgaagcaccgacacgacgattgttgccaagctattggacatgttagtcaaaatgaaacggccatattggaaggaatattagtacagacctcccagtaagcgttgccctctccatctgtgcctttgccgccgcttggagtggccttgggacgctcctgcttctgcttcttggcgggagccgcctttctctggggaatgtcttcctcatcgctctcgatctgaacgcgacctctcttcttgtacgacgacatgattgcgagttggtaacgcgatgtgtgacaggagataaataactgacaagggaatgaatgggtcaagtagtaagtgaagcggtatgattgatcaagttccaattttgcgttgggttgtgagataagtttttttccagaagaactgcggggcagtgaagagaggtatctggagtgctgagcagtgagctcttcgtgaaatcaaatctctcacaaaaccaggcttccaataatttcccaacgcctcaaacgcgaaggcttgatagtgacgtgcctttcgggctgtgtggtcttgacgcgttttcacgtgagaggtacctcgactgtgatattaatcgatgccccactcaagattagggtcgcttggcagatgcagcacggactcttgagcgggcaccgttcgaggtgtcaggcggtcttggccgtcaggagtggaaacccggaatgttgaattgctgggaaaggcccctgattgactaaaaatatagaaagcttggggcttgtttcgtccttcaacagaaatccgggggagattgggaagtgatcgaaataccatttacatatctttaatgccttcctcaagctcaacttaacctgttttaatcctgttcggtttcctctataagctttgtattcagattgctttcccaacggtgcgacaaagcgccgtcccccgctcacttctcccacctttaaatcgttcgatcctcccttgcggtgagccgtgtctcccgtcgcggtcgaagcgaatcttcaacaattctatatgagccaacaagatgcgcctagctcgggcgcgactcccgattgcacaatggaagatcgcaaagatctcgaacccagcgcgatagctgcgaccgctgcgaccgagaaaccgacacttgacgagagcaccgttgcagcgatcgttgctgctgctgctgctgctgacgacgcagttccgagccctccgaatgcgccgcccacagacgacagtgtttcgaccaaagtgtttcgctttctgtccacagcaacgccagaaacactaggtggtgtagcggttggtctggctgccacgacatacctggtcctggggagactcggtctcgtgttaataggggcattcggcgggatagttactttcatccaatgggagcaacggaaccctgatgtggcacgaatcgtccgcggtgaaagaggcattgacgtcctcgcacgactgctagagaccaaaaacaaggtcattcaagagaaggaggagggcgccgacgctcaggattgtgccttgattcacggatttgaggatctgaggcccgaaacccgtgaggccatgaatgaactcgtcgatgctgttgtcgacaactatgtaaagtggtggtactcgccaatcgtgtcatcagacaagttcttcccactggcttgtcggaagacgcttacagcgttcttaacgtcggcatccaaccaccttgcgagaaagcgaccggccgacgcgtttcttgacgttctgacaaactcgtcctctatcgtggttgtgttcttttccgaactatccaatgcctttacagagttgccggccgactctaagctctcagcggcggatgctgtctacaattacctggctgctcatccagactctaatctggccagcctgttgaaccaaaagcagcaggcaaacaagttccgaatgatttcagaagacctgctcaactttttggagcgttcctcgtacgaatgtgaaccggccagagtgtttctgagggagatgctggccggtgttgttttggaaatgacacttcagtctttctcaaagcctgaattcattaattcctggattgtttatcttctagaggccggtgagccggatctcaatcaggctatcgacgtgggaatgcagactggtcctgatgtggcgtttgcagatattgacggcaacgtgggcaacatcgggctcactaagggcaataggaattcctttgatcatgagcgggcgaggcgcaaagaatccttggcgcacaaaaagaagctcagcaaagctgaggaagagatggaactggccatggaagaaatgaaacgactgaaccagatgattgcagatgagactacgctcttggccgagtcgtctcaaaacgaaccgaagcaccacgaagcaacgactacaaacgaaacccagaatgggcaggaaacccagggggattcagcatcccaacctaagccggttgataccacgtcaaaagatctgtcaaagagcatcggcagcgatagctcttcaagcaagaatgatgttatcaatacgcctgtaacacctctttctgccaccacaccttcgagccaaacgtctccttcggcatcgcaaaatccatcagcagtggcagcgacagcaggcttcacaagcttcgaccagcttgtgcccccagctcgagagggatcggaggttgactctatagtagaggctgccaaaccaccattgacggtacacaacgctaacatcactgttctcgatgagcctggtgacaagccgatcaagtctaaacccgtctgggattatctagttcagatcgaacctgccaccacactctatcctggctggatgatcatcagaaagtacagcgactttgaggtactccatgaagtgttgaggcggattgcgactatatcaggtgctgtcatcttctcacagcagcacaatgtgctccctccctggaaaaaccacacccgcacttccttgaggatcgaactagagcgctatctgaaagacgcttgccagcaccagagtttggctgaaagcgagggcttgagaaagtttatggagagagacaacgggcatcttccccagccaaaatcaggcctccaggcatttgaaaagattggcaagaacgtgttgggggtattggcgagcgcacccttggagggctccaaagctgtgatggatggcgtgactggagtgttggggaatatcggactgggaccgcagaaaaagccagcgccggccccatcaccaccaccttccgccctacaggacgtgacagcggccagtcgcctttctatgtcaaccctttctcgaaatgacagtactctgtcgctgaatcggttgaccagcaagactcgtgacagcatagacagccagcgctcgtcggtagtggccacccagccgcccaaacttcccgctatggatcgtcgtcctagttataactctcaaggtgatgcggaacctgaagccagcttgcgtccatcaagagcgtcggccagaaacagcagagagcaaagcagaacttctagccgagcgcctgcacgttcaccttctattctcagtttcgatgggttccgtcttcctcccccacccgacatgatcacggacgactacgaatcccccattagccctcaagggcgcttatcagagcatcttactcaccattcccgctcgctgacgatgcccaccctcagcagtcagcggattaacggcccgccattgacagggaagcagcacacaaagctctctgagcaagagactagggtagcagtggagctcatgtttgccgtcatcaacgaaatgtacaccctctcctcggcctggaacattcggagaacactcctcgcggctgccaagtcatttcttctccgccccggcaatccctcgctgttgtcaatccagaccttgattcagcagtctgtccttgacgccaatacgtctgacgccggaatcgccgcccatttgaagaagttgaggcagaatgtaatgcctactgaagaggagaagaaggagtggccagcagagatgactgccgaggaaaaggaagccttgagggtcaaggcaaggaagttgctgatcgagagtggggtaccggctgccttgatgggagttatgggacaggcggcgacgagcgaggcactgggacggttgtttgactgcttacagatcgaggaagtggcaaggggattaatgtttggagttgtgctacaggctgtgaggactgtcacgcactgaggaagtcatatgtacttgtcaggaaccaagtgtacgagtaatgtggtgaaatgcttgttgatgtttgagatgccgggataggattatcggttataattaatgtcagatgattggtggcgggctggacggaatgattactggttctgataccaccctgagagttatgggatgagaaataacacacctgttggtatgggcttgtgccatcttttgtgttttgcttatgaaagtagttcttttaatacacatttatcggaggttttgattacaattgagtttgacttggaagcacgggtggttttgatgtgaagtacaaatctagctaggtccaagacatgtggcccaagcgtcggcgtctgtaaccgagctgcccataatggcaacctggccttatgtaagcatgcatttcgatcacatctacgactacctgctcttgtcgatgatcacctggcagtctcactcacacgtctgatgacactggttccatgtttttttttgaatctcataaaacgaaatctcacacaatatcatcggacttctcactcgctcaaatccaacggtggaagacaatgttctaaattgctccttagccgctcgcatctggcattcgcagcgatcttggcttacggcatcacaagcctacagcaccacatacaaacagcgctacagagtgaaattccaacatcatgaaattcatcatcgccgcgccagcgactctggcgctggtctaccgcgcctacagcaagaacagcctcactccgttaggtatcttcgccgcagccctcaccgccatcgctcacgcagtccacccctggaacctccccttcgttctgctagtcgtcttcttcctggcaggaacaagagccactcacgtatgtctcacaccctccccatctccctacctcatcactgatcttcctcacaggtaaaagaaaacatcaaagcaaccctcaccctcaaagcaaccggctcctccccctcgggcggcggcgaagggccccgtacccacgtccaggtcttcgccaactctttaaccgctaccatcctcaccctccttcacgcgtatcaactccacgcaaggaaacaagcccttttgtccaacccctcctccccggacaacggcaccctctgcttctcatggaaaggcgacctcctagtcatcggcataatcgcaaactacgcctgcgtggcagccgacacgttctcctccgaactcgggatcctgtcaaagtcctctccaaggctgatcacaagctggaatctgaaaaaagtgccccggggcacaaacgggggtgtcacccttgtagggttgggagcggggttgttgggaagtataatcatcgtcaccacctctgtcttgttcctgccgttttgcaccgccgattcaaagaccttacccggtggagggcagccctgggatgtcaaggaacggcaagctctcattttagggttgacggtctcgggtttgctgggcagtgtgatggattctgttcttggaggcctgttccagaggagcgtcaaagatgttaggagcgggaagattgtcgagggggagggaggggagagggtgttggttgctagtccggttgttatctctggtcatcatcacaaacctgggcaggaggaggatgcgggagcggagatcaaggctaagcttcttcgtggcgaggggaaggatgcggttgaggagactgcggggtcttctgccgtggaggagggggatcatgttgtggatttgaagaagaggtatgacccgaagaataagcagcggaagtcgagttttggggatgagaggccttctcgggcggtggttactgggtgggacttgcttgataataacgatgtgaactttttgatggcgtttgggatgagctttggggcgatggcagtggcggggtggtattggggggtttcgctttggacgattgtcccgggaggagtcgcggtttagttcttgatagtcaagactttgtgttggtttggagttccagcggatagcgatgatataatggctggttggtgggggaggaatctgatatacgtatgttttaatgatgatcaagacccaggtctttgtgggctccaaatattgtctttatatgtaaaggctgactgattccatctgccgcaacacagatattgtgtaaattaggaagcctggcacatatctgccgtaggccatgctttggtatataatggtatctaaaactcctggactccacgcctctttctattacccctgaaaaaatctttctgcctttcgaccccttgacaggttgtaatccacagtcttttccgctcttcaaatgcgtgcagtggtaagtaactgtgagctaggactgcgcaggaaatgaattccggcatcgacctagcgaaataagagaagcaaactcagacaaggaaaaaacatgcaaacacccacaacagccataatgctctcctaacaaaacagaaaaaaatggagagaacaagaacaacacctccgctcagctcagaatacccccaaaaggtttatacgtatccagatctttcaacaactcgtccactacccctggtagataccggtcaaggtgctgcttcttggcatccacactcagcgtgttcccactttcactctttgacctttgcctgccaccgctagcaagcagtttggactttcctgggctacctggaattaactctggccccgcaatcacactcgttctgtctggtttggggatatttggtgtttctggcgtcaggtaaaagtacaagaattccgtgaggcggaacttgacctctctgccggtctcacgggacttgaacagggaggttacggtaagtagaccgtcaagggcttcgaatactcgaatattttggggcatgtcgagaagggcaacgacaagggtgattattgtggcgcattggatggcaggggagttgatgggttcgagaagatcgaggagaagctgaagatgaggatacatgttagaactggcggggaagctagaatggcgggcgtatcttacgttcatatgtacgctgcgctgaaaaagcaccctgcttggcgggtgcaaaagcaagacgccctggatgagatcaagcgcgttgactatcaacatgtcgtacgatccatctcctcctcgcacaacgagccagtcgagtgtggtgagaagacgctgcgcaacgttccattcgaatccctcctggagcttgaagaattctcgaaaagctggatcaggggagaggtctgcgagcattcggcgcggtggttgttgttggttttctccttgtttcttggggctaccttggccggcaaggcagatctgagcaagaaggccttcgacctgccttagcccctttttgattttggaaccatcgaaggacgagaggttatcgaaagcgagagagagtaatgattccatcttgtactgctaatcctggactgttgcgctcgcgtgcttcgtcgatttgttgcctcgagtattgagatttcacaatgcgcattcgccacgtatagtcgatagtataagagaagtgccacggttggcgagctacactcctgaatctgtattgcttgcgcacgaactgctcggatggttggttttcctagaggttggacgcagtatcgcgacaggcggtataagtgggcgcggtgatggttacgggccggttgtatacagtcgaagtaagaacgcaagcgggtatcgacgggaaagggagagaggacggtacgcagagagtcttcggacgcaaaagagtgccagactgactcgagatgctctgtcgcgccggttggacttgagcttggtccaaactggcgggatatcgagtccactgtcgaacaatcaagcattgggtgccacagcaaccggctgataagataaggacctagctgcccacctgccgaacagggatcactcaacctcaaactggggaagcggggccgtgcgttttgtttcaatgcttgtggaacctcttgagcaacattccatccaacactgcatcagacttccagaaccagacccaaagcattcaagtccagggcatggcacaagagtccaaggacgcatggaaaagggatggtactgtggttacgtacaaaagttttgcccccttgtcaagtaccgcccagggccttgtttttttggctaggccaacttcggccaaaattctaccgcaatttcctccagaccagtattttccacctttcaacaccacttagccagccagccagcaccacaatggctcccaatcgccaccttactactgaagagcgtcaacgaattcgtaccctttatttcgacggccaccttagccaaccccgaattcaagaaaccactggttatacgaaataccaaatccgccatgcgatacgagccccggcggccgaggtcgccccacgatctggccgaccacgcgttattacggccgatcaagagctcgagcttattcggtatgtgtgtgaatcaaaggcacaccgtcggatgagcttcctggagctttctattgcccttttcaactcccttcttaactggattacgattcgcaacgccctttaccgccacggatttcgccgtcgagttgctcggaagaagcctcctatttcagaagccaaccagcaaaagcgactggcctgggctatagaacataaagactggactctcgaacaatggcgtacaatcctttggagtgacgaaacctgggtagttggtggtcctcaccgtaagcagtatgttacacgccgaatcgacgaggaatgggaccctacttgtatcgttgaaaagcaccagagaaaaggagggtggatgttctggggctgcttttacggctcaactaaaggccctggtatcttctgggaaaaggaatggggatcgatcaataagtattcttaccgaaagaatatccttcctaacgtccacaaatttattaacgataccttcgagcaacaccatttacagctttcttttatgcaggacggcgcacctggccatcgagcggccggtacgaagaaggatcttgagaataggaagattagagtagttgattggcctcctttttccccagatttaaaccctattgaatcctgttggaattggatgaaggattatattgaggataaatacggccttgaggagaagccgtcgtacgcgaagttgaagaggtacgtggaggaggcctggcaagagcttccggaatcttaccttcaaacgctgttggattcgatgcccagtcggtgtgaggcagtaattgcagcgaatggtatgcatacaaaatactagctatagatatggtgattattttgtagaatacaatcgtcagggtggaccttgactagcgcgagtacttgacaagaaggcaaaacttacccctgcaccacagtatgcaactttgaaaccagatccgcaagggagggagtttgtctccttttttatgccgcttcctctgttgggcttgctgcttttgcccccccttcacaatgtctatttctttttattttgacagatactctagaagctcagtagcgatcccttgatcagaaatcttggatctcttccattcactctcagtgctttgacggtcagctcagctcatcaaagtctcccgctcccacatctcaccaaccaatgtctgtggcttagctttggccaaagaaccaaccaaccgtctgttccctacctccaaaggctttgttgcagtggtaaatatttattaccacaaagcacagcctacggcgtgtagctatacctgtcagaggagccgctatttcgcatcgaaaacgcctggaggagtgcttgggttgacacagagacagcagcccacggactctgtacgtttggcatttcgacgaaagtctattcaatccaattaaattcctaatttgtctcaattctacccggtgagcttgccgacaatttctttctcttcttgtctatgattcgggatcttcaacgagcacatgcaaatttaccccaccatcatctatcccacctcacaacccaatagtgctgtcgctgtcacccaagacatggtggagagaaaggcccgatttgcagcagtgaatcatgtcatctgttttacctcctctggtgatttacagatttgcacgggttccttgccatcatgtctgcaggaactgggctgatggctgtgtactgacattgatagtggggtaaacaggagagctggagctaaccgtcaacttggcgattaaacagagctacactggagctcacagatcgcatgtcgtcaccaacatcgagtgccgcccacgatccgagatcgcgccccaccacggtaccttccaaatcccgatcgttggaagcctcgaggacgcggaggctgctttttaaaagcccgcgccgcaagcatcaggcaacgatggacagttcctctcctcttcatccctcctcgttcaacaatcccgcagctgcccctcatccccaggctcctacacagatacccttcctgcagtcatctgctgtcatccctcctcggactacatcgtcaaacttcgctgcctcgacagtcccaccagcttcaacaaaaccaaattctaaaaccatcctagagagcagttggctatcaggctccgctgcaaaccctagtcagacaacacctggccatacccgccatcaaagtcgcaaaccttctgttacttccagttcctcgtttccctcaaacgcaatggctcaacaacaaccgccagacccctcccgtttcgcaaccgaggatttcttcctcaacaccaagaggctatggacagagcagaaggacaaggtcctcacagccccatatgattacctcaacggccacccaggcaaagactttagatccgccctcgtcaacgcctttgacgcctttctcgaagtgccaaaagagtccaaagaaaccatcaccaaggtggtttcgatgcttcacacagcctccctcctggtcgacgacgtagaagataactctctcctccgccgcggtctcccggtggcgcacaccatctacggtattccccaaacaatcaactcgtccaactacatctactttgttgccctccaagagctccagaagctcaagaacccaaaagtagtcaacatctttgccgaagagctcctgaacctccaccgcggccagggaatggacctctactggcgcgacaccctcacctgccccaccgaagatgagtacctcgagatggtgggcaacaaaacgggcgggttattcaggctgggcatcaagctgatgcaagctgaatcccgcagcctgacggattgcatcccccttgtcaatgttattgggttgatcttccagatcgcggatgattaccagaatctctggagcaaggagtacaccgccaacaagggcatgtgcgaggacctgacggaaggaaagttttcgtttccggtcatccacagcatcaggagcaatccgtctaattcccagctgctgaatatcttgaggcaaaagactacgaatgaggaggtgaagaggtatgcggtttcgtatatgcagagcacggggagctttgattatacgaagaaggtggtgcacacgctgattgagagggcgaggagaatggcagatgagctggatgaggggaaggggagggcggtgttggtgcataagattttggatagggttgttattgattgatcgcaatggttatcttttgagcaggatctttctctattgtgtggcgaggagttgagcgatgggttctttgtttgagagccaatacctatgataccaatgatgaagtggacagaataaccggtattgcaactcaggaaggtgtaataatcttcaacttgcaccttttaatatggggaatatgtttaggagaatatggttaggagaatatgtttaggggaatatgtttaaggaaatctttacctagcagcgcataaagttatgaagcgtgttgcgggttagggtttcatttttttcttccttggtattctctatttctttgtccaccacgtggacagcaacaccaatttccagccacgcggtaaacctcaagttgcaaccaaagcagtgtaaccagtctcacaaacggaaagaagcatgatcataactcatcccattcataaacctatcctctaccattctgtagttctgttaacctagccagtgacattcttcctcctcaccatcctcacccacctccttctcctccactcccccctccgtcccatcccctcctccccctcctcccaactcaaccccccattctgcctcatcggggtagcctgattaccgctcctcaccggctcctcctcactttcctccccaatcgtccccatccccccaccaccaccagcagacttttccgaagaagaggcgatatcataaacccacctctccccctccgtctcaatctccacgcccgtaataatcctctcctctacccactccctgctccacagatcaagcccccacttcttctctgaccactcccacccttctggcggctggacatcctcaaagaatctcgttccctgcggtcgctgcccagagatgcgctgggctgataaagggtcgtatggcgagggggaaaaaacccatggttcccactcccctccggggtaatgactcaaccgttgaagttcaaagatttccacctcgcgggtttcaggggcggagtcgaggattatttccttcgatagcaaagctgggatatcaacagtggggattttaacctggtgagggtcggtcggggaagagagcgtgggattgtggtgaaggtactgctccgtggcttgagcgacaagcctgttgattgttgggtgagcagacaatatggcaccccagccccccacaagcatgaggtagcgccaggggatgaggtgggctgatatgagcattactaccagagcggcgaatagcccgacgaaaatagcggatgagagcgcctcgtcggagaagttggttacggggacgattagagtcacgactttgtcgtggacgacggagaaatcctccatgacgttttggaggtcacccatgttgcggaagaagtccttggacagctctttggtgggctggaagttgcgagctggtgctaaaggagggccacggggggaatagcctaggtttcggacttggtggtcggggtcggaggatgttgacggggcagggtgacgggcgatgaaggaggggacgaagatgaagaagacggctatcgcgaggggaagtgcgaagaggaggtaggggtcgaggcagacgaaggtgtagactgcgaggagggagagggtgtgggttggtttgcgccatgaaagcactttcagagctcgagactggaatttgaaaaccacaccaatgcgagcgttgaagcggcggaagttgttggacatcaaagggatagagaatccgggtcgttcggcaaaggctggagggtcgtcacctcccatgatggagggtgtttgtgtgtgaccatcttctgctggtatcacttgtgatagaagtctgtatgaagtggttagcataccagggctcgaaattagaagagcggaaaaacacaaaagacctacttctctagtagtttgtcttgtatacttgcagcccgaaatataccattcttcaagctttttactttcctcgccgagcgagattgatgatcttgtggttgtgatggttggctttcatcaccttctggcatgacggattcatcggcggcagtcaataactgttcttccagttcatccaccatcgtgataataagtcaagggagatcgtgatgtttatcgatgattatgcgctgaagaccggagtgttgatgattctgtctcactattctgttcttggatgcatgtgaatctcatgcatcactcatgagagccccacaaccggtgttcgatggtcaagtctggatgagagccggtcccaggagtcgaactgcgcgatacgcaggagtctcgatgaaggaatgggttcaacggttgacgggtgctcggtagatgaggctgttacaattgttgaaggggagatgccgataagattcaggtggtggctgtaagactgaggttgcgtgtctggtgtcgtcactggtgaacctctcaagcccgggccacacaacgtcacatgccacaaaactgggccaagacaagcgctacgtttaggtgctgcaaagtacagcagaaaggacatttgtacataaataatcagcatctttgttacatttcaaggaacgccatatcgcaccattcggccaacttgcgtggaataagagtgtacgaccaaaacatgcaattcccaaaaccacgcgctgaagcacgcccgttcgtaccggagcgccgggttcggtggctacatccggggccgtcactccgctaaaaggtacggaattcggcaggccatctgcagggtcccgcgaatcctgcttttccccgccgtgtccgatggcttctccaagaacgaggagcctcaccattgtttgatgttacatcaagaacgttgacaggagatgaggcacgacatttactgatgatactacggcgtagtatagcgcgcctggcacgcgttgttggcgcgtggccgaaatgttctcgaaaatcgaaatgaactgggaaatgcatcaatactactccataccaccggttggttctgcatccaaaaacagtcaacaaccgaacattattatctccccagccagtttcgatgagacacgatcggaaattagggatataacccgcccttctatctgaagagccaatggccacgacggctcggggcatttccgggtcgatagtcgagatgcccttcaagatgaaatccattgtcgcataataacgagccgggatgaggggccgggttgctgaggtcgattcctacaccgtcttaatgccctctgttaagcaaacaacaaacaacagccaggtagtcgacaacaagcaaggtcgtgctggttgctgtgttgctgataggcacgatgcgccgatggacccattcaggcacatgtacagatagatctaggtatgtagggacaccgcttcttcgcaacacgatacctggaagaggggtttgcagcagcgcggtgcacaggtggcaggctgggaagctctcgatgctggaaggtgagtggtgccaagcaaggaccgcagaagccgagcggaacccgctggcagcaaagactgtgctcgtcattcccgtttcgaagacagccaggcagagtttgctggcttggtggtttttttggcggtcccctcctcaccgtcgacgagtcgacgccactaacagctagcatctggagtgttgccgtgccttgaatgggacaatactggcattgtgctgcaagggcagccttcccctgcatgttgctcccgtagcgccgtgctagagggccgacagtttcgagtttgtttttgtttcctttgcccgatgcctcttttgcattgctctgcgactctggaaatctccaaaaaagattcagtctcctattcatggccccacatgcccctggacgcacgtaccatgctgagccggacggttcgtttgcaactaagttaggaggagctgtcgtgattcatatccaatcaatcgagtgacagatatatgaggagctgacatgccctgtggttgttgtaattctatcatgttttgaggcagaagaagagaagagctgcagagagaggcagagagaggcagagagaggcagagagaggcagagagaggcagagagaggcagaaatataagggtttcttaccgtaaactttatgtggtgggacgggggccaacgtcggtgcaggtgacgggagatgtgtttgcacgatccagccagcctcagagcaaccgatcgatgaccctgctcggagtgatcgagagaaggagtaggttgtcattgtccttgatgaatgaagggaagccgtctccacgtgttccgagggctctgcaaaaggttccagaacatgtcgtgcttcctttgacgttgatgatatcgaggtgcaccctgcataccgttccctcgcctcttgcactccacatgccgttcagctgttgcccagtgaaaaaagcgtgctgcttgtcacgaccgctgaaagttgcaggacaccccagtggggcccaccaagcccagcccaagcccactgcccgctgccacctgccaccaaaaacagcctgcaaaacaactgtctctctcgccagtggtgtgtcccagaccagagagagtggaggccaagagaccagcagcgtccctgcaccgcaccacaacttgaccctcacctcttcttccatcgttcacttcacgacgtacgctcccagtgcgcgagaagccacccccattgtattctcgacacgctcgatcccacactctgcgcgcccccggaatgaggtagcctttcgattgttctcagctccctgaccggactgagccttggacgacgacgctcctaaccactggcgttgatcctttgggggttcgaattcaatctacgctgccgaagcgtgaattgcagccatcgcctacagactgacgccgggacattggcctctcccgagcccatcagcctctgccacatcatcatcctcttcaagcacgacccccattgatttaaagactcttggctgctgctgcgacggaaaaaaacgagtggcgcgttctcggccgaacctatgaatagagaccatcgcgctccggctgggcccagacgggagaaccagtcgcccaccaggttgtgctcccccttttgaactggctgtgtcttgaattcgctgcctcgtgggcatcgaaatattcactggcacctgcaaaaacttttgcggcacatgggaccgttgcctcatgcagcattgtgctaacccttgcgattgttttgttattctaggagaccgctgaacctgaacccccccagtcccaccaagatcggctccatcagacggcccaccgtcgacgctccaatgctcagtgcctcctcttccaacaaccactccctcttctctttcggggctgggaatggcgtgtccaataacgtgaccgacatcgccaacgcatccttcgagtttctgccctcggtcagcttcgacgacctccagagcagcctcgagtctgcctcgaccgacttcaaactcacgcaatttccttcaccgactgggcagggaacaattttgggcgatcgaagtgcgggcaacaaccacaacatggtcgagcgcctcgacatgacacggccaagcgccgctgcccatgccttgcctcagcagcctgccatcacgcgttcacgaacaggctcaattctacgaagacctagcacgtcaagcaggccgcctcaacctagcactgcttctacgccatctggtaacccaggcgtgcccaatgctcccactgctccggctgtcatgcgtgcgcgccgacaaagtcattatcccccagtctccaaccccaatcccgccaagccgccacggaagtcaactggagatgttcagctgggagaggctcaggtcaaagaggttcagacccgaaagcggagacctagtgcggtgtctttatcagacaggcccgtcctcgaggcttcgagagcgtcggtggatgttgcacctcgatctacggtagtggagagcatgcggcacctgacaagctcgagagcatccaaggcaaggtctgtgcagccattgcccagatccaaccaggatatgctcacaccagacaccacgctcaaacccgaacatactcacatagccatggcaatgcctcgctcccccaacagagttgccgccaagggttctactccaagctcagcgaagcggatatctgtcatgccaggaactcatcatgccagtcacgccactggactgggtgcacgaactatcagccctaccgatacaagacgaatgaaacgcctatctacgatgcaccacgttcaacagggccctgttgctggcgcttccgccgcgctgccccatccaccacctatttcggccgacggtcgcgcctcgtctcgatccccttctatgctgcctcgaaagatctcgaccccttcgtcttcacgaaccacgcccgaccacaccagaaagtcatacagctcaggtctgtccgtcaactcaagcaccagtctcaacacggtgcggacgtccactggctctatgcagcagcgagccatgcaaggtgcaaacagttcgcgattgcctgcccccaaggcgctcaatcttcacaattcggcgagctttgacagcagcgaggaagtgccaccggtgcccgcgattccaaaggcgtacgagtctccaaaggaggcgcatctcgaagctgcttcgtttctggagaagaggaggtccaacctggcctatgatgccagcagcatccatagcaattcgacagcgagtatatcgggcgcgcagacgagtgattcagcacctgccaagcttcaacgtaagccaagtaacaggaagacagtacacacctcgaagctggatctcgagaagaatcctgcggcagctcagtcgaagaagagcttgcaaccgctgcggttgccgcccatcacccttggtcccctcagcaccccaaccgcggccaagattgctgctcttcaaactcatggtgacagaaatctctccccgcccccatcaaggcagatcccaaaaacgccgacgactcccatgacggcatcgaagggcacattttttggaagaatacggcctgaagacagggccgatatacagcatctcaggagcagcgcgtcggtgcagaggctccatcgtgaaagtcctgccactacggcagagccacccaccagttctactgagtcctttgccggtgtgaagaatggaaccgccagatcagggccgtcgcctttcttgagccagtcggtgccgaaaggagggaacttcgagactactttgttcaaaaggtcaaaaactggcggggatttcacccagcctttggatgcagcagcagacgtgccagttcaacacaacaagccctcggggccccgagcgcaaaagtctgtcgtgacacggcctgcaggtggaaattccccgccaccgcgtcccagtccggaggagccgcccactccttcttccatgagctctctcaggcgcaaattgagcttgtcctggaagagaagcgcctccaaagccagcggaagccaaggacatcacggagagcaaaacgccgtcaagcatgattcaatgccaccgccgaggattcctgtctcggcaactctgaacaaccttcccaccggcaagcctccaagtcccactccgtccacgaaatccaatggcaatgggacatatctggagtcacgaagacggaagagctcggcctccagcttgaatgcggtgctttctggggaacgaaatcgcggtgataccggtacagcagctaagaaggattcgaccctgggaacagtgaacgagcgtgccacggttccccacaactcgtctgtggtgcaaaggatactgaaacctaagggctctacggcaactcttcgacaccacgacgtttggaattcggaactcgacaaggacgatttgattgcagaagacgagatgaggaagcttggttcacggcgtaaggatactgagctggcagccagaactttggatgctctccgcaaacgtgcctcggccaaggagcgcgtcagccctcaagaagccatcagaattgcagttctcaatatctacgaacggggagagattgtggactataaggacatctacttttgcggcacacaaaacgcggcaaaggttgtgggtgatgttcagtcggagagtcccaatttcggctacgacgatgagcgcggtgactacagcatcgtacccggtgaccatcttgcgtatcgctatgaaatcatagacgtgctcggaaaaggaagtttcggtcaggtggtacggtgtatcgaccataagactggcgttctcgtggccgtcaaaatcatccgcaacaagaaaaggttccatcagcaagccctggttgaggtcaatattttacagaaactccgcgaatgggtgagtgcctttcctggggatacgtgcctggcgcccgagctctaacatgacttgcaggatcccaaaaacaaacacagcatggtcaactttacgcacagcttttacttccgaggacatctttgcatctccaccgaactattggacatgaacctctacgaattcatcaaatcgaacgctttccggggtttctcactgaagctgatccgcagatttaccaagcagatgctgagctcgctcaacctactaaagcagcacaaggttatccactgcgacttgaagcccgaaaatattctcttgcgccaccctcttcactcggagatcaaggttattgatttcggttcgagttgttttgaaacggaaaaggtgtacacgtacattcagtcccggttctaccgttcccccgaagttatccttggtatgcagtacggtctgcccatcgacatgtggtctctgggttgcattctcgccgagctctatacgggtgtgccaattttccctggcgagaacgagcaggagcagctggcctgtattatggaagtgtttggcccaccggaaaagcatctcatcgagaagtcgacacgtaagaagttgtttttcgacagcatgggcaaacctcgcctcaccgtctcctcaaagggccgtcgcagacgcccatcctcaaaaacactacaacaagtgctcaagtgcgacgatgaagcatttttggactttatcgcacgctgcctccgctgggatcccgaccgccgcatgaagcctgaagaggcgattcgccacgagttcatcactggccagaagacatctgtccccatcagaatgcgcgaagggtcccccagcaagcgtaccaatagcatctcggcccccagaccccttcccgagcctccagcagccgtgagggccgctactatgcgagcgcgggaggcttccggtcccaacaacgggtcggtcggtacgaaaaccggaagcatgccaacagccacggcccgtaggacctccaacatgagcaccgcatctagcatgaatggcagtatctccagtgtgaagcgtacgagtaacggaaccacaacgacttataccaacggcaatggcaccatcggccccagcagtttacctagagcatctctgcgcagcgtgagtggtggggttgggcctgtgggcctgtccaacaactccaaaacagaccttgccgcagcaggtgcaaacgcagccatgagtcgccgcgcataggagggacgggcctaggaggagcggaccgcacgaagatcgagggtacagcagcgctctcgcaagactcagtaacgatgtcaaatacgcaaccttggaaacaggccaagcactttattcctttcgtatggcggtatcggttatcaaaaatatgggtagactactggtcttggagacgacttggggtaaggttgggatggtaacgacggacgggattcaaaagttgtggtgttcagacatgatggtagttgcaagtgttttttggcctctctggacacttttcccagcggcatgattatgcgggaggggccgcagaaaaagtgatgataccaaatgtttatccttttatttattctgtctctcttttgttcattttgcatggcattgcgcgcgcggttgtgggttggtgttgcgcagactacttactacatttttttttggttgggttggggaagggtttgtgatgaatgaaatggcgattaattgataaggtgggcgcgcgcgcgcgtgtgtgtgtgtgtgtgtgtgtgtgtgtgtgtgtgtgtgtgtgtgtgtgtgtgtgtgtgtgtggatggatgatggatagggaagatgagagagcttagaagaagagagtgcatggagagaagaaaaagtcagagatacaaaaacctgtcttggggtcactaaaaccaacgagttccgttccttgatattatcagtgctgagatggggagagaatgggggtttgaagagaggttacattacattatgatacatatggcatggcgtggatggatggcaaggcgttgttaagctaggctagggtgggttatcgaagtacaatatacattgtcgatggggggattcgtgatccgttgctttgtgcgtggttgtgggtagtgtggtgtaaacatacttgccctttttatttcaagcatacgcagtctcgtcgtaccatgttggacaacaacattttggggtacagtctatgtcttttgcgaggcaacacgcacgacgtcaaagatgtcaactgttggattccatcctactattaatcacccgactcactgtcttacaacgttacagaaaacacacttggtcacgatgatgatgcttcgaccactttacttctccccctcgatccccatacccacccagcctgttggaaacgtatcaccttttgagggcaacaaaatcacccagggcgcaaaaggcttaatcaagtaagcaagtaacggctgattcgcaggattttgaatctgaagaagagaaagtcgcttgccccttgctgcttgtaacagacataacctcctcgggtttatgggcattggtggtagataaaccaaaagtatggagagatataaaaaagttctgtgacatggaagaaaaaaccccaaaaaaaagcaaagctcaccggccaacccgcagggtgaccagttacgaaagccgtttcggggtcaaacggctttgcttcggagggcactcgaactggggctgtccgaaaccccatgggggggatatgagtgggcgccagccagccagcccacttgaccatttggccagtcggatagtgggctgctgttggaaggtaggtgtgggaggtggtatatgtactatgggaaggagcgagtgggaaggagcgggtgggaagagctaatgaaaagatgcaatgggaaagagcaagccggagttaagaatcgggcaggtgtggggaacgatgagagagaaagggacggcgggatcacgaaaatccaggtcaacttggaagataagctcgcccgtgctagtcggaatggagataaattttggtggactggaatccagcgccagctctggctggggccggtggactggacgacccagaatagcggcagaatgggcaacgtaacgcgcgatgctggcggttaggagacttaagaggctgccttgctgtcatccatttggtcagttcagttgatgaaatgttgtcgctcccctatcttggaccgcattcttgtcctttgctatgccgaacatttgggctggcacttcttcgtctcattgtgtgttcttggaaccagacatcccccttgaggttgataatgagttggttgatgacaccgccaaagtgaaacccaacagcagtggaactgagaaagctgtgaaccaaaaccatgtgttgcccttgatcatgcgctattgttgaggcagcccacaatatttaggaagctgatcttaaccaaaatcccgagtcccctttcattgactcctcatcattgttgctctcgtcctgactcggccttcctttttgtttttcatatgggatctcttaaacaggctatgaacattcggtaaggaagtggatgcggcggctgttgagccagggacggccaaagccgacaagaaagcacagcagctgaatagaggttttcgtcatggccatcaattttgcgccttagccatgccacagaagaaatacagcatgtagaccttcagctctttttgagcgggttgcggaggatgtcatggccaatgcagagagtgcctgtctcatgactgaagtatggaattgggaaggccgctttgtcatgagagcgttgttgcgagtttggagccgctcttccacacgagtgcttcagctgattgggagcgccatgtaaaatatgtctagcaagatgagatcgtctttggaagaaagtaaaaaggtacataacggtatatctgtgaagagcgtcggaagtaatcaacaaatcaccaaatcatgaaaacatggtactgtgaacaccagcggaggcgtccacaccccaagttgttcaaataacaatatactgtacagtacaaccagcagaaaactcccaaccatgcgccagaaacaccactccatgccatgcccacccagaaatagtacatccagcaacaaaagctccccaacccaacccatcctatccatgtcccatccaactccaaactcccgaaaaagtctctaccaattcttaaatagtgaaggcccatacggcacgttgaaatcgcaatggtacaaatccacactccgctgcaccgccaacagacacgcctcatcccactcgtaccccgtcctgagcgagtcctgaaagatcttcttcacccttgggtgcaagatcagcttcccgatgaagggcatcaccccttcaccaggccagtcaggatataccgacaccgagttcagcgccgggaacttgtcaagccagtccaaaaacggctgcccgttgaacctttggccgtactggaaggcgaagccggcgtagttgaagaagtaaagcccaaggtgctctatcttctccgactccatccaaacaaacgcctccgccggcacaacgatgctctcgagccccacgactgggcaccagaggtggcgctggcgaaccgcccacctctgctcgaccgcaagctcgagcacccgcaaacttccttcgcgcgcggccggcaccgcaagtaagcgccccagaagtcccacatcgatcgcacagcgcgaccggaacagctccaagttcggcaactttgggagcttgccttcgtcaaactccaaacccatctcctgggagtggagagggtgtctcgcctcagccccgtccatgacggtgaataggtaattgtgggcaattaccgggttcatcgtcatgatctcgatcttttccatgctctccgtcatggggggaaagatgcgaggcaggagaatggtcccctgggtgtgggcttcgatgcccattgccggaccgaacgaagcgtgcttgagctgtcgccagccctggggagtgggttgaccgggcgtccactcgagctggaagccgttcaagcagaacgcttccagattcggcgtggacgccacgatctctggcattcggagcacgtgctcctcggtgctggtgccggccatgtcgatgtcgacccataggctccggagctttggcatcctcacggcctcgatcgcccgctcaggcttgctgccagtctggacgaggtctagaacctcaagcgtgtcctttgacaaatcaagaagttggaccaacaatgagactggggcctggtagccatccagtgaaagttgggccaatccaagcttttgactaggactaggagctgggtccaactcctggatggtgtcgcagcggtgcggggccgcagttttgatgatgaggcattgaaggttgggaaggccaaagagaagcatgtaaagacgcttggcagagagcccaaagcctgatacttcgtctatggtcaagctcttcactccctggtgccccctcaaccatgtggcaaaaacacggttgccaggattgcgcggctgggcaagacgaacttcttcccagagcaacgtatcgtgcttaatgatacggttccattttttgctgactctgagggagcggatgacgtcggaggtgtccaggtgagagaagatctgacggaggagttcgagtggcagtttggctgcagggtcgcgaagagagtcttggagcttcaggctgtgagccatgcgcatgagaatctggtcgtattcgtcatgggcgtcattgcggtacttttcggaggtattgttcaggccggcctgaacaagtttcttcatgaaaatatataggcgggcggtggtgagcccagcatccttctcgagggttgcgagtgttctcgcaacctttggattgactctcttggctttctttccctctttttcgagcttaaggatgagccggatggtctttgcgacgcggcaatagccctttgacagttgttagtgatttttcctgcaactggtcgacaaaagagacttacagcagcagagattgggcgaaggcgaattattccgagaccggtcgtgatggcagaaacataatgaccctcagtctccaaggattcggtgaggagatctattgcctcgagatgtttgggcgatgaacaagaaggccaagcaaaaccgcaagaacaaggactgttcgcaacatcgtagattgcgtcgagatccttactccggacgccattgacgaattgcttcaggtggcaagacttgtctttgccatgccggacttgctttgtgttgcccttgttgcagctacaaaaatcaatggcctgttgattgttagaagggagtcttgaatgagataccgatcgtgtgcgaagtgaacctaccgcgaggatatcaccgatggcttccttgatctctttcttggagatagaggcacgtgccttgttcaagaggttctcgatagtctgttcggactgagtcgtgccggaggaaccaaaagtctcggccatcgtgaagacggacgtctgtggagctgtgatgttgggaaagaaagtagattccgagagagaaagcaaattccgagagaaaaaaccaggcagtgtatatatggccggtcgaaatgtggcagctgacctcgacttcagacgaaggatttggtgagaaggaacgataagaccaaagaaaagattcttcgcaagatttcaagaaggctagcggctgttaacccctatctcacaagagcacgcctctttcgaacttgggccgccgttattcgaattgctgaagccttccccagaggtttggaggtgaagaagatagataaaaccgtcttttgtgccctgatattcgtggtgagaggaggtgacgaagtcggagttgtgacagcgagttgagtcttctcagcccatgaccaatgacaatatcagttgttgtttacttggtgagccaagggtcgtgcaaagttgtgcaaacaggttgtcgatcctttcttcaggggctcaatgcctaggctcacacgtcatattgtggctttcgttcgatgttcaacaagcagagttttcattcacaacaataaaaacaaggaatcgttatcgtggccacaggtcgttcttttctttggcagcgacttacactgatagataccactttacgcgcttgagacgcgtctccgatagccgatagatgataaggctatatcgggtcttgtatgtagtaccccgatagatcgatatcatgcccgatactctcatatcggccgagctccctcaacccttgcccacagaccgtggaagctcatcctcctcctatcatcaaccctgtcgttgatccctaactctactttgacgtcactctcagccctacccctatctatctccatctccatctccgacccggctccgaaaatcactgccgagcaaatccggagccgtaagccggttacacacctccgtgccgtctccgccgtgtaaccctcaacccacatggccatctcgactcttctttgacttcaacattcccaaacggccggtgacctccgagttcaaaacggcttcgccacagtatcacagctctcagcaccggaacccagacttgattccccactcattcagaatacgagactcaatgaatatatccaacggcgtgaaaatactactctaccttacccatcttcttgtcaacagtccagaaggggatagtcagcaacttacacttgcgtagcgtacttcgtcaccacgattgggggcgtgttggtgatagaagctcccttccaacaaatccaactctaaccatccaaccacagcaccaagccggagatgccttcgcggcatttcccccccctcctcacttgtaacagttcggaaagaaaggattcatgaccatctctggtgtaacccattccacgtgtctcctcccccgtgccgcccaactatctcacgccaatctcaacgccacgaaagccacatctctcttacccctctcatccgcaataccacattatcacagtctcaccgaacacatccattctttaccttctagaatagttccagaaacctgcatctcaccggcacaacaagaaactgcaacggtattctcagcttacacaaaacccccatccatccggttcccacggatctggaaaacagcttaattcgggcaattctttactgcgtgtttcatctcaccacccgcatatcttgaaacaaaccacacagcccgcccttccatgcacccttccacgcggcttctcttgcatatgcctagactttcgatttaccccccgccacactacccaacccagtcatgcatgctcacattttttgactactgtaggaaaatggcacacacacacattatcaacaacaacagcaacaatgacgttaaactttcttgttggttttgacagcgcattagtctgcagtagcgcatatggttgggtacgtacactgttccacggtaggagttgaagcacccttaagcgccagcctcaccgtcacacgtatcgatcttgaaggatcagaaacaacctggagctccacgcggcaactcgagacccatagaataacggcagttagatacaccaaaaaacctagcaacggcgcggccggcacctacttgcccgaatctcgtcgccataccaggtaggtagacaggatcccaatcctctttccatctatctgttggctgcaccacacggcaattgaaatccatccccatcaacctcaaacccccatctggaacaagaatgtggaatttgacgaaagcacggcacggccgccaccggttctccagaagaaggatcgtatcctctctctgtggcttgacgcccgcccgtccggcacaagggttgacgaaatcacatcaacttccgagtgccgcctctcactcatcagagcagcagcagttgcaagttcgtttcatgaacaaacttctcgtttcatcatccccctcttcccacagtggggtcgagagagacaaatctgaggttgaacaaacttccatggcgttcatcccaaacaggtgatgtcatcttccctagatactgtcatcaccgtcgtgattcacatgctgtatgtaatcatcccacatcaccaatttgacaaatctctccctacctgcacatgacaatacttcatctcggctccccttgacaaatccgagttgtcactatctcccccccctttaatttttcctgacctcaaaacttcagagtagtattccaaagcctcctccctactactcagcctagccaccaaaaaacccaggcccatccggtccggtcaacgggtcgggcaggtctcgttacccgaaagcgagaggagagcagcaacccggccgggattgccatcatctccgatactcatagtcaaaagcaaacgattgtgtcgtagtggatcaagtcatatcggcgaacagcgaaaactgcatgtgtgactgaaaaaatgtgtctctgcatagcctctgtactcgaactcggcagcaattgtacaatttcaaataaacctttttgtaatcgtaatctgtcatcattgcatgtcttgccagcctgtagaattaatgtactgggcctttctgtgcttggcttattccttcggtcaagtgtccagtattagccaacctgagtccaaactagaaaaagactccctgtaccggacttcatcaaccccgccataccgagcaaacgtcatatgcagaaagccatagcattgcagagaatacgaaggaaaagagaaatcgcaatacgggaacgcggctgcttcctccacgctttgtcagaggaagatcatgtgctgtttagcgcaagttgtcatcttttttgtagaggagggtaacacaaccgcaatgagtggtgtgtgcgtgtaagtgtgcgagtggaactcgctccgttttgaagatgcaaatgtactggtacatgaagaggggagggggaccacacccatcaagtcgttgtgttcccaaatcaatccaaaaagaaaattacctttctgggggggaaaaaagggcaggattaggataaaaaagctgatttgcccgagtaaacccatgcaaggggaaagaaatcaagaggaacaccactgcggccgcggctgcggctgcggcgggtattcgatgggtcgctcagaaggggaaaaaagaggggggaagcttcataacgctgtatgcggataggctcgctcgtttctccattttcatcccatctttttgctgtatgggatatgcacgtcgcaactctcgggtcgtctcggctgtgggattgcggcgctgaggggtggtctcgagagagaggaaaagcagtggcagcctgggcttgacgcaagacgcaaggtacggtgcactgcagcgcaacccatcgcccatccagccggtaaaaatactactaaaaggctcccagctagcagaagcttctatgcatgacccggttttctcacccttcggcacttttggtgacgtcggggggtactatatgatatttctgtcagaaagctgtcagactgccacccatccaatccgccccaaaacggttgtggttgagtagattatgcgggaggagtgtgggtggtgtggggttgcccagcaaatactcatcggtaaatagcatagaaaggcttggaaacagccatcatgctttgtgtgatgatgatcataagtcctatgatcttcgaagaggtggtgtgggtaagggtggtgggcagctgagaaggggtggcgggtaggttcaccagggccgccagaaatggtcgattagcgcatgcacactcggtcgatcaaaaccagcccgtcgggccacaattcaagggctggagcgcattgacgatgtcatggcaggactggacaggggaaaaacgcctgcgggagaggcgagagattcaccgttgctcggtgggcaaccccggggccgatactcgggttggatgggctaacagctcctccaagcctccttctcgttaatgctggtccgacccttgaccttgatcataacggagacagcaagaatcgaaacggtggtgatgttgggagctgtcggtgttgatgattgacaacctgcttacaaactatgtgaaataagcgccgtcagatatcttttttgcaaaaaagcatcatctgttgagatgcaaaatcgagccaagcgtgagagagagaaaagcttggtgcccctccggtttggtatttttggaccccaccacttgcctaaagcgggagtttcctcgtcctgagccaacgaaagggcgccgcggggggcacccctctatttttatcgtaccaggcacccgggacgcctgattggcggccgacgcttcgcttgcacccttttgagcttaaagtgctgacgggcagggatgggagcagggctttgtcacccccccccccgccatgaataactcttcaacgttttttctcttcggctcttcgagcatggaagagggtgtgcacagcattttctattgtctcattgtccttgaatcttcgagctctcattgaacagtctgctaataaaaacagaaaaaggaataaggccaatcggctgctgcaggaaacggtgccaacatgggtggagacgagatctaccaaaacgtccgattggggagggggaagggtgacaacacatgtcttggcttgcaactcattattagcagcaagctacagacactaccgcccaactattgaatcgtcatgtgatgcttgcttttgctgccagtgtgttgaagtgaattccgccttggggaccatgatggtcgtgcctctatgtaaaagccgatacaaggattcccgccatgatgagccgtagctgggaccgcctcatcttagatcgaatcgggtgacatgccttcgattctgacggaacagctagcgtcggaaacctcaatcctatcctgacatcacggcactttggttcactgtacgtaggcagttattgatatttcctaatgctattcaacagctatcgtccaggatctgcaacccctggaatcccgccagaggtgctaagccggcctggcaagaataatctatctgactgcgcgagtagtaatgaaaggcttccagagtcccgcaaaatccctcccgttgtaacagtttcctccggtaccatcttgcccgctgctcctgagcaggaattaactaagagataacaaagagtattgtcatatgcatcaaacatgaaaacatgactcggaaggggaaacaaaacagccgacttgaatgtaaggaaacaagataaaaacacacaaataaaaatacagaaacattcgccaacgctttccgaaatgtgatcaaaccataaaaaccaaaagaagaagaaaacccaagccaaaatgttccggttgcccggaagccctctgcccaaacgcctggtatcgtgacccatatgcatccataacatgacatcttccatagaatgaagaaaatcgaaaagaaaatgctggtgtctaaatgatgaggggtgttgtacaatcgtgtgttgtttcgagtgtcgtagtacagtagaaaaatgcagacgctatgcttctagattgtcgaaacccaagttgctgtaaaagccaaataactcctgagccaaaatcgaggctctattgctctgctgagcctgtagcgttcaagtcatggtaaaatgtcttggggagcccagtgtgaggtgcggtgtcccttggtgttttccttcgtcttcgataacagaactgcctgtccgttggtggtgcattcgtccgtaggggaaattgagcgacatgggcgagatgttgagtcttgtttgccgcttagagaaaggcaggcggggctgatgttgacatcaatcgatcgtggcccacgaagagataggaaagccgagagaatggttgggttggtgccggagcccgttctcggaatgagtagagataagagacccaatcttcatactcaaaaggtaccagtggtggtgaatgcgaggaacggcagcctattgtcgaagacgcaacttttcatcggtaccggctgccgtgtgagcttttgtgtgatctctggccgtgggagtggtagcccgagtcggaatactgggagtatccgtagtcgtcatatccgctggagtgtgctgtgtgatccgcgcaggcgtacccaaccaatatcgtcctctgctggatcgtgtggcctacacgaccatatgccgcacaacggtcgatggcgtgctggtagtacaagcagcggcaagatgagtaccgctcgatcaactggtagcacatgatgctgacttgagcttgagactgagtgtgagtgtctgtatgtatactgggggtaggaggtgtcgtccgtgcagagggtgttgactgccggagcgggaggtggtggtggggttgctgtgatgggatgtgtgatctgatccgatctgatgtgtatctgactatcgaaaaccaaggcttggtgtgcgaacttgtgtagaggggtcgagtgaaagtgcacgagattcctgagagcgaaggccaaaataaatataggagcaataccgaaggggtggcagagcccgaattcgaggtgtgcaagaagagtgcgaagcgaatggcaacgcaaggcaagcaacagaacaagagaaatgagtaattaggcaatacaccttcatgcaagccagttgtgaatgttcgactcatcatctccagaccgaaagaggacatcgtaggagccttataggcgtaggagcctgtcgaaggtctccagccgttgtttggaggggacctgcgtctgcggcgtgaaggcagcaatcaccacctgctgccaggggaaggatagggatagtagctcacacctcgccctcagtaaccagactccagcatagagccatgcagactaacgcaacggaagagggcgcagggaccgttgttgggtggtccatgaaccggtacatggctctgtttggcatggtgttctctggcggatgcacaaggtgcatgtcatggtgcagggtgcaggtgttgtttgggagacttcgcagtcctgttgaacgcaggtgcgacagaaatcgacggtaggtgggtgggttctgctggtacgaagtcgcagtactagcggttggccggcagggatagctcctggagggtacagcgacacctcaccccccagcccccaactaaacggaacccaagcatcataacggagcgcggcaatctgactgcagtgccggggaagcccgttattgcggcgtgactctctctctagtgtcgagcttcgcgggtaccggacgacaaggtcactcatcgccgcccttgattgaattggtgtgtgccatctgccgtcttagagcttgcttccagaattggcagatacattagggcacaggacacagaacgagacgctgacgtcaaaagccacataggccactcccgccatgcctgaggttccattttcgcaaacaacacgcgagctgcttgtgctgtgcgtatttgctgatgcgtcttttttcatgacggccagcatgaaccagtgcatcagactcggtgtgtgttgtatggcgcggtgtggtgttggtgatggtgggtggtagtgaggtacagcgggagccactgcaggagacaaagtactgcagcgtgatgcaagcgcgctccagcgatcgataatcagatcttgggacctgccggagcaatattgcctgcgtcgggtcaactctactgctgcaggcatcaatgtgccacgacagcagcattgaccgagtacatacatactccaacaacttccagcgtggttttttgttcggtaaactatgcaagcaatatcgacgactgatcatcaaaggtcccggatctaggtgggccgctgcgcattccggcttttccaagcaactcaggaagcagatgtcgcagttgacgccgcgttcagctcgaggtcctctcgactgttcaaacacgcaacgccgagttgcaatagcaaccgagacaagttccgtccatcattcgacttgtggagcaagctgggcatcctcgcagcagggacggcgatatcagccatcctgttcttggcaggccagttcgacgatgaccttgccgggagagtccaaggcacacccgcggagccgttcccggccgtgagttaggcggcggtccttctgctccttcaaagcggtccctcccgtcggcaagtaaggtaaggaatcaaccatcatcatgcgctgggccttgacctgggaagtcggtccgccacatactcccacatcagcagtctatttgctgaaccgcaccgagagccgcagagcattgtgggtgcggcgtagatctgaatcctgtatgtcgatggggcgtgcagtgtacaagcctcagcgggggtttcgggggtggtatggctgaccaggcaccacgccttcgaaactcgtaacgaggaaaccagtaaggcgtctccaaagatagttcgagttcattgtgtagcagtgggggaagttgctgtattctccgatcccatgctggagtactaagttaaggtagttgactttgaggtccgagaatcagatggtgtgttgtacgaacaacggacccggggttgtctcccgggtatctgggtgggtcagtatagacaaggatgctgacgacttcactagtgatttctctactactgacgagagatcatcaccagcatatgatatcagagcgaacagcccaatccatccgcaacgaagcgagttgaaacggtcgtgccaagaagagatcgtagaaacgggacagggaccagggacgggagcatctgattggcgtgcgggaacctgtgctcaccgccaaggctgtcaatgtttcttgaaacaaaccgccgctgccatggcggcctctgtttcctggcgccggtccggatcacggagtcggggggcttgaccgtggggccgggaggatgccgctcaactcggccattgggcgtggtacggaatgtcgaccggaaccctgacggtcttctgttctgctatggctaaatctgcagtcatcctgtgtgggtgctccctcccctagttcggctacagaatggcatgaccgacatcgataccaaagatactggatttagcagttggatctcatcagcacccgagttttagggctattgttgatatcatcttgtcacagcgggcgcttcagccgtacctcgcccaatggtggccaatgcgatgctgcagatggtggctgccctccctgaccgtcaccctgggactggaaccctggttcgatcttgcgatcggtgggggatgtgcccctctacctccaccagtcggccttttaccacagctctaccatctaccatgtgtgtactatattaccaaatgtcgaaaaggcggctggggacggtgaggacggacagcatactattgcctgacactttggtggttagtttggttagtttgatttcaaggatcggccgctcctgtcagcgctggagtcctgcgtgcgcagagagtatttcctagtggtcgcctgcctaccatctgggcaatcacctgaggttgtaacgcggaagagcatcagaacatcaatgtcctccacccaaaccaggggttatcggccatggagacggcaatgatgactcggctgcctcgggacgacgacggtatgcgtagagagtactcctttcaatgacgacatcaagacagcactcaccgaaagggccgcccaaacgaggtcccataatcccttcggtccccttcccgttgctggttgctactgtatgtggctcgtatccaccgcaagaacttcaaactcatcgccaacacctgtgtgcgttgtgtcagcgtgctttcgagtttcaattcaaccttgcgatatgcctgaccccactgcgcggcacgatcttttcgggaaccctaatcatcctttgccggcgccgggcccatggtgatgatggcacgatggagccctagtggtctttggatgccgaccggggagctctgggacgcggcatgcggggacaaacggagttttgaccgagggggctcgggagcgggccaaccaggctggcttgacgagcccgcagtgctgcatgtcttgcggcctttcgtcttggggtccaatcaggaatcggctcgataggacggtcgcaacacagcctcgcgatggctgacggctgcagctattcgctgtcgtcgttgactcggtcgctcaacaaatggagcatcagtgacgtcgaaagtggaaacggaatcgccggcaggaattaggagacggaagatgtaaatgttcgcaatagcctcttcttgctgtgtttcatcattggcagtctcccccactaaactttagttgctgccagtaagtgcatttacaattgcttgcttggtcggctagcacccaatcaggcatcaaaatcaggcagcagtccttgggggtgctgttgatgctgaccatgtgaaagagccaacctcccaagaagctcgacggaaacaaggaaggtgcaaagctgcaatctatcttaccccaccacagcaaacgttcatcggttatgttgtcgacgccgttgagatgagatgcgagattctgggctcatttccagcccccatccatgatatcgccgaacacttttatatctcttctgccaacacgagcctctgtgagtaatttctgagtggctgtgagccatgaccatgattcggtccaagggatatacgtggtaactgaccgaaaaacataggtctgcctcccgttaagtgccacagtgtatacaggaaagtgtggcttcaaaacgactagaaacagtcaaatgagcgtcagattaagcttcatccgcactcatagatgcccgtcttatgtcgcacaaactctacaagccaccatcaggaccccctctcgggttgctgttcggtctgccttctgccgtacaaggaggttcccaacatcagcttctcgatattcatctctcctgcgcttacaggaacccatcgccgtgtggtatactgtcgcccagtcttgagggctcatgccacacagtgccggaatccggacggtttcagatttgggcgcagagagactgtggcgattactaccccagattctttaaaatgccttgagatgcggcacagagtcttttcacattgtgtcgggcctttcgagttggctttgaacccaactgtcatgcctagttcaaggggcaaagctgccttttggcccccaacccgcccccacgttcccagcaaactcggtaaactcacgtttcaccttgaaaatccacagagaggtccttttgtcgcggtacaatacgaaaagacactcggcagcgagtatcgctcctgtgcctttctgggttgatggccaccatggatacccatcgaactgtgtgtggttgctgacatcgaagtcggtgtcgagcataccatatccgatgaagctgtccggtctgacttcgagatcacctcttgtatgcaggagactggaccccacaggctttcttagccaaccgtcggctctctttcaatagggggtaaattgtgaccacctggggagccttttctgaccccctgacgtcttccgtcctgccctcgcggtgtcatgggacaccacctctttctcaagtgagatggatgcgtgatattacatgcaaagacgatgtgaatagcagcaaaataaccggtacgaggaatgtctctggcaccgaacagttttggtttgccctcaggtccaactggatggtcacacacagggccatagcaaggcacatattcagactcccgattgcactgcccaagccagactcgcatgagtcggcatggagagatgggcattagcgaaacagtcagcatcttgcacgggacgggacgagacgaaacggaacggttgcgatcctgaggaatcctccgcaaaggcgtcgtccacccccgaccgtgcgtcttgtttgcgcgatccttagactccgtcctctgtctcatgatgaggatcataagagtcactcgccttaggcaaacacatcccaagtctagctgaccctacccagctgaagagccggaatcctgcttggtccaccgtgtccacttcgtcaggctcgtgacgtctcatcaaccacatggcagcctacttggtagagttttctttgggactcttagattagctggttgttggagctgggccaaccacaatcaaggaccacatatcgaccagaagcagcgccgtaatacaacggtgattgcgtgacgactctctccgggtccttccccggcgcagtccgagaaattgtgcctgtgagattcccgagaaaccgggcacagtttcagaagcagtatacagatcgccgaatatcgccagcaacgacggagaaaacggagatgagtcaacgacagacaaatgaaggtaggtacaagaacccgatgtatcttttgcttcacacctctatccaatactctcacaccacctcacaccacacatgctcaacagcaagaactgggatatcttcaccgggttatgctacctgtcttatactaggcgcctcgaggtttgggtagcaccactgactcagcccaacgaggactcctggttaatcaagctcgaggctggacaggtatccaccttctggcaggtcgacgacagtccaacaattgtcgaggcatattcaatcttgagttcgtgttgaactcggtgagatcaggtctgtccagtcaatatacaccgtcacgatgtttcaccctcctctatcgccagactgccggagagcctcccatcgttgcggctctctcggcatttctactctcggccaactcggaaatcaatcgcaagcctgtgaatgagaacaaattcttaccctgtagacccccctttcccgtcccaaactgtgtatataaacaagtcctggacagaattgctatccttcaagacctataggccatctttccaggcctatcaactgtctcttcaaaggtatggttcagtatttttgcagcgtcagttattctgtccacgacatacgtgatacctttgatcatcccgtaatgcaaaaccccccaaacatcaataatcaacctcccagaatatctccctgctttgcctacctacagacaccacatccgcacatgcctcatttttacatgatacaatgttgtgattcctcatacccacactcacaaacatcaaccgacgttcagaatgagaaaataagcgcgcgcggccaaaaagaggtatcggatacctcgcaatcaattacccaggccaacagatcgtcggcctggcttttttttcatgtacatcatgaacagtgcataaaccgaggcacaacatatttgaaatcatgatatcagtattttcgaaatcatcaaggctgctctcgggctggtgtgcaagtgtaaaatcgtggtgaatctcggttacagaagaaactaacctatcatacgcctttaaataaaatgaagccccgtcaacaggcaactctcgtaacgaccaccacggggagggtattcatctccatcgttgtagcccgccccccttccccccccccccttaaagtgagtaccatgtttgccatatccttattccagccaacagcttccacttggcgtgttgtgtttatgatctcgatcgttattatgggtgtacgtacaacttcacaataaatccacagcaaagctacccaccgaaacagttgtatattgctcgggtaagtaaattctttgactgaaacgccgaggaggtgggccttttggtgtaggtaactacctgcggatggtgtctttcttcgtcttcgtatgagatacttgctaaagaagccgattgtaccttaacaagtcttgatgtaatggaaatatattaccgcgttgcttatcacctctttcaaaaaacaaaacggatatgtacaagacccaaaagacaaacacacactgcaggcccttaacctcgtcaatatctaatgcactctgttagttttatatactatacaatacctcccccgtcatatactcgaataatgattctctaccccatcatgcaccttcgtgatgttatgttctatgtcaagagtagtggtataatacacgtccatcagtcggctagaatacaataaaactcgccctttctaggcctggccaaccaaaatcgtcttctctcatctatgatttcatcctccctctcaaaattgccctccgcttcgcccttgccctcctcgcggcgagtggcctttgaccctctataatctcacgttcctcccgggtgtatctctttggattgccctgaccgcagctccttcctccgtctctccctttccccccgtgccgccagcggtttcggttgctggatcttaggctcatctttctgcacgtgaattgcaccgcgacctggaaccccaggctttttcccccggcgcacggccagcagctcactcgcctcaaaaacaaaccacctatttttccgcgccgccttgagcagggcctcatccttggctgtagcccgcttgatcatctcacaaagtgaaaatctcggcctgagagagagatgtgccgtttttgaccagtcccagaaagagcggatatcgttggtgggtgccgctgatgcccgatgtttccaataatcatgacggcgaaagtcagatagcaacagccgtttgtagatgtcgggctttgacaggcagacctttgccgtctctttgttcagccactgcttccaccgttccactctggaaactcccctcttgatcaacgacttttccagaactaaaatcttggccaaatgtcgtttgcttcgaacgaaacgacctgcctgtacccacttttcaggcaaagtagagaatcccaggtactctgtgaaatcaggcgaggtcgccttcaggagcgtcgcgacgcgggatctcatcagatgtgagtcaaacccggcgaggacggcatgacggaatatgtaggtagtcaggtggaggcgcctagatgtccaggccatcgagaagagcagtcggtatgtgatctcgtctggctgtgctaggctgtgcttggaaaagaattccaaggttgacatcgccaagccgagtttccgctggtcccggcaatgggagagtattgtattcaacgtaattatatccggcctttctccagcagcaatcatagcctcaagaacctggaagaggctgttgagctgccctgaggtgccgtatttgtgaatcaagatattcccgatccagaccgtcaggcgccaatcgggaccataaagctcgcgctggctctgaagaaaagactgaaaatcttgcttcagttcaagagcccggtgcaggtcgaggccagccatctctgcgtatatccggcgcatgcattctgggtccgtaagataacccttcgtgttcatcgcccgcagaatgtagcgcctaacgtcttcagccttgattattcgcaagaaaagaaaccaagttttgaagtttggcgcatgcccttctcgaaccatcgcaccgagcgtccgctggaaggctcggaggtgcttggacttgactgcgaattgggcaacccagttgaaaacatcggcatcgagtttaagacctaaagacttcacgcggcgtaccagcccgcctggcacatgggtgaagcgggatccatgaggtgattgggcgagatatcgaagagcgtctttgagggcgggaagcgaaactgcatcaacgcactcctcatcataaaaagcgcgctgcagctggcggacaacgacatccacatgtgtggcctgttcatcaccctcattcccgtataagaagcggtgctcaccaggcgtcagttggccacccacgagtcggcgaacgtaacgcaggaaagaagccttggtccaaatctcgccaggttccaagggtggaatctgatctgccctaaccgcgaggcgatatggctctgggtgaatttcatgaaacctcgctagttcacggggacgcgagacgggcttcctgaactgcatctccgttgtgctgtcttttctctgcttcgaatctttggctttggggcccgcgattcgcaaagacaactcctccaccgtcttcggtgaaagctgcagcaggtcttcccaattatcctcggttcgagttccaacgagaatgccacccttcactgcgcgaacaaccccgttataggccgctgtgacgttatcaagcccaccaaagatcaggataaacttttcctgtgtagcactccattccaacccttttagcccactctcccacacggatggtaccggccccgttcgtttcctatttgtcgtagtgtataacctcatccgacatcctgttcgcgaacaaatatcccaaaagttgtcatgaaagtcgtcttccaagcgcttgaagccgtcatctggaagtcgtaccttgaccacaagaatgtcgtgatcaagaataggagtctgcttcaacagagtctcgagaatgagacgccagtctgatacccgcttgtgacgctcgtcgatatgttgtgctgctttgagagcggcgcggtgcttcgaggcttgtttctgtcgagatccccagcttgggttggtgcctagatagtcgacagtaacgggaatcgccccgtgaggttgatatggcagaatctccaaccggctcaccaagttctgtgcattcttagtggcggcggccttggcggaggcatgagcactcgggcgtgcattgtttgctggcttcggggtggttttggcaaggttcgagcggccggcgtggaagaaggctctctggtatccggaaaatgggacaatcgcagtcgaggaggaccagtagaaccggggaatccgtgagcgttgcgaccaggccctccaaggttgcgtgactcccaggctcatttgctatggatgtggcatgtcgaatggcggaagcattcggccggccgggggttcaatatccgggccttccgatctctgtaaatgccgcagtcgccggcgtcgtcgcagtcgcaatcgtcgtcgtcgtggtgccgtggttgctgctgtctcagcaagctggagcttgtcactcttgtcaaaaaaattcaagagcaacaatccagtcccgcccgcagccacaccggctgccccacttcaacacagtgacaaataagttgcaaggacactgtgctagcataatcgctctctttcaacagaaaaagggggtattttcattatcaatgttgaactccagttctcccatgccggtattgctattcccaaacgatattacccacgcccatgaaaccatcatgacctcaatttttggtctcgccgtttggaggagctggctctgaagggccggatttatcaacgccttgccacgacggatcccacccctttcgatgatccactgctcctgtcgaatcgccctcctcagccattcccttgacgtcgctccagtactcaagctttcttacctcctcatctgcatgcttgactgcgtcggcgagattcctcgcccgccgttgtaattctccatctgcgtccttgcctttcttgctttgtgccaccgtttgatcatggatctcggtcaatctcgtcagcaagaccctcctcgaggcctgaaatacaaagagtgacatgatctcatgcatcaccttctgtagccctgccaggtcttcctgtgcatgttcaaggtagttgtccactgcctcgatcttttcccggtcgattcgggatgtccgcagtacggccagaagatcgccaacatgctcgatgtcgtctggttgttcgacaccacctgatttcgttgagctcatgctaagtctgctgcctcggaggctggcagtccgtttactcatcctgctcaagctgcgttcgcgttcgcgttcgcgttcacgactcatttctgacgacggtcgaacggaaaagtactcgggattgagcatttgggggtcctgtgcaatgtacccggaatcttttctgacccgtttcctgatccatgctcgacgacgaacaaacgagttccaccatctcgccttgtgccatgaaaacttcttagaaaatgcaaacgaatactcccagccctcatcgtcgacattgtcgtccttgttgattttccactccggccaagcccactcccagctaggatcgggcacctgagctgtgtgtatatctgtcgggctgggcttgtgggcgtagttcgtccatgctgttgggtccaagttgcccagggctttggaggagaaaagaggtatcccgcagaggaagccgcctctttggttctcgtagagaatctcgattgccgactcaggcgcctttttcttgctcacactcttcctccttgctgtcccagcgttgacagcgtcgacgacgtcttctcgtaatggtgtaggctctacaagctgtcagtgttgctctgcagaaaagatatgacaacgtgggcgtaccattgatgtggatggacgggcgcgggcgttcctcctcgtctgctacacctactcgcgcattgctggcatcaccattctcacgatcagatacccctagtgctgactcccgtgttgagtcctgcaatgacgaagacggccccgcagtaggaggcccgatggagtcgtcctcggcctcggacttgtcaacgaggttgatctcgtggtcgaagtcgctatctttgggcgggggcacgcgacgcgacgagcggtgatgttttattctcggcatgactacccctctaccaaaagcatgacgtaccgccgccttctttcagatccctatgtccgcaaaaatacattgacaaaacgaagaacacggggccgacggctatagctggggcgctttgttggggttcgtggagatgtttgatgcaatgcgctggtgccttggacagaagtttgtgttggagctggcgcgtacgtgtagagatcgatgaatcgacaggggtgtcctcctcaggaaaaggccccacgcaggtgcaattcaagactaaggcatgcgattgagacaatgggcataattaggggtccctgatggaaaccaaactggagaattgaagtgtgcttgtcgagagaagcgtgtgaagctgaactggaagcttcgcctgcgccatgatgtaatgtcgttgggttagcggtggtgccctggccagtttgatgccaagctccccaggctggctcgtgcttttgcatctttatagtgggctgaagaacactgtctgagagagtaactgatgtatagctgatggctacaaaacatgaaataaccccaaaatctgacgatgtatcaaaggattcaacaagcactgtagagctgtctactaaaatgatatccgcagtgtcaacaaagactctttccatgtctgaaatctgaatctcgaatacagtggaccccatccccaaagcggggcagcggcagtggtcgtggccccaccgcaacggacctctcgaccgcgaactgcccctcgcctacgtcatgcatgacccgtgaatgaagagctctctccaacaagtcccagtttggtaccagacaaaagagcagaaaaacgtgccatgaggtgtaaccgggaacgaatagggaggtagcaaaccaagtaacaactggtgcttgcttcccccaaatgcattgaaataccacaaccacccatcttctttgacctccaacttccattcatcaatcagatttcacacaagacacagctcccatcccatcaaaagcaacaacgctcgacagcttccacttcaccaacaaaaccacataaactttacaaacaaccacaatcaaaatgtccaagtctcgcgcccccctcgccctcggtgccctcgccgcctcaggcattggttactacctctacagcgccggcggcaaccccagagcagccgagaagcagtttgagagtacgtccaaccatcacttcaccacccaccccatcatctacccctgatactaacttccccctcaggcgacgcccaccgcgccgccgccaaaatcgaatccaagattcccaccaactacccaacccacacaacccacaaggccgagaaagaaggcacccgcctcggccacgaggtcggcaccaagattgactctgctgtatgttttactccctcgttctcgccccttttttctttcaaatcaaaaacactaacaatccaaaggtaaccaccgtcaaccgcgacctcagccaagccaagcacgaagccgaggccatcgccaaacaagccaaggccgataccctcaagaagattgacgagtttgaccgtacggtcgaggagaaggccgccaagagcaagagctaccttagctcgtggttcgggagcaagtaaagctcaacctatcaactacttaataatgaaaggaggaggtgggaggtgtatgataatggaagggagggcgaacggaactggtttctttgtttatcatcatgacatgaaggtcgcgccagcgatatctatacaaccacaacagtcatgtttgtgggttttgataactgggtgttttcaggttttcggggttttctagttttgtttgaatttgatctcaagttgatcgatcaattgatatcattatcctatccatacgtgccataatcccgtcccatgtccccaaaccaattcaacattacaacactcctccaggaccctactccggcaaagaagcagcaaccaacttcaacatctcctccgtacccttccccgcattcttcggcatcttggccacccgctgccaatactccccatgtctcggctccgccaaaacacacctgctcaccaacccaaccctcttctcttccgtcccatgctgcagcaaaaacttgtaataccacgcccacgtatccccatggtccgtgtccagcttcagcgctctctcaaaccatttatccgcctgctcgagtttcctctctttccagaggatatacgccgccgtcaccatcagcaccgggtcgttctccactttcttcatcgcctccgccagcagcgatttgcgctgggttcgctgttccaggtgaagaatcctctccgcccagaggagaccgctcttgggcatctgctgcagggcagtagccatgagggtcttggcctgagtgatgttaccagcgcgacgctcaagacggatgagctcagtccacagctccgccgatttgggaactgcctgccttgctctgtcgaggacggaacgggccttgaccacgttgttgaggcgctcctccagacgggagtacaaaagccacaaggggaccgacgaaggaacggcgcggacaccggcaccatatgcctcccttgcctgcgccggctggtccatgtcctcgtaaatctgccccttcatcatccaaagctttggagcattagggaagaggcggagggcgtcaatgacgaggtcaagggcggcttcgctgttgcctagctggcgctcaaaggccacggaacgcatccagacacgatcggtaggggcgttttgccgggcagtcttgagcaggtcgcgggcttgatcgataaagccgttgtcagcctcaagcttgacagccgcaagccagatgtcctcgttatcggggttttgcttgaaggcacgggccagaacgcgacgagcctcgttaatctcgcctgccttttcgcgggccagcatgagccagaaggtctcttggtgagggcaggcctcgacggctttttcaagcgcgttccagaggtcctccttgttgccgtgctctctctccaggtcaacggcggcgaggtaaaggctcttgctgttggggaagacacgaagagcataggcgtatatcgcccgggcggtggcgtacttttcgcggctgatactggctttggcatcttccatccagagctccttgcggtcgtcgtcctcgtccaacccccagccgagggtctcttcgatgatattgctgcaggtgatgaccgcgccttcttcctcgcacttttcagcctcagcaatccattcttcacgcttgggcatggcgttttgcttggccaagaacttaacggcgttcttcatgactggtcgtcttgcaccctcaccaagctgctcctccaggcgagcggccgcaatccacagctcgtgggagttggtgagcttcttgacggccttgttgagcaccttgcgagcattctccggggtctctaaatgtgccagtctcagccacaagtcgagtgattcggggataagctcagtggccttggctagcaaaatgcgggcatcttccacatcttcttccaggttcaccgcatgaatccataaagcctcggattgtgggttatgatccagcgcctttcggatcaccttcttccgtgatctttggtcattctccagtttcatggccgccacccagagcttcaccgactttgggttgttgcggatagcttcagccgcaataatcttggcattgtgagtgtcgttgatgttgatattctcaagccagatatcctcattcttggggcaatgctggcacccagccgcaatcaacttgcgggcggcacccggtttccctgctgtcatctccaatcttgccgcagccatccaactggacgcctgtttggggtttgagtctacagcagacttcaacatctttctgaactgctcaatatcaccgatactctgctctgcaccttgggtgctggctagtgaggtcaagtaacccctcggatccagactcgtggcgctacctgccgtagcaagcccgctggtttgcgatgtctgctcaagtcttgccttcaacaccttgtcgcgggcggcaccgatctttgcaaaatccgtcgtcgtttcggttcctccgggaatagcgctggtagcagtcccatcgtccgcaactgtcgtgccaaactgaccctggtctctcgcagcagctagcacgctgtcgggcacagcatagaatctctccatcctcgcttgtcgtgccctcttggtcttgccggtggcatcctttgcctcgggtatgttcgcccaatcttcgtcggtgagctcggccaattttctcttgagcccggcaaactgctgctgaatctttgggttctgtcgctcgtattcttctcgttcggctttttctcgtgcttccctgttcgcaaaaagtagaccgttggtatttcgttctccattcatctaagggtataagacgataaaccgagtgcttttgggtgtacgtgtgggaaggaaagcgctgggttagacttgaaaaggggagagtactaacctttgctttctcctcctgtttgccatcttctcgtctatatcttcccagatcttgtctgcctcttcatcctccttatcatagaaaccgccggcaaacaggccaacctcgttgtctggatcctgatatcgagcggcgtcatcggtgtcatcatctttcgcattgtcgccgccgagtcccaattgcgctgtcctctttgcgacggcagccttgatttggtcttcgctgggaccttctcgcgccggacccaagtcagatctggtggtaaagccagtggcaccacgcccgagaccagcgacgtagttctcgggcgcaggcatgctaaggaagtccctccgtgacattgtggtggctgtttatcgatcgcgatgtggatgatgatgtcgtgttctatgacgaatctttattcatgcgcctgcaatggttggcggtcaccgtggccgggggagcgaatcaatggtggtgaactggtaactttttgttgcatggattatcagttgtcgcgccaggcacgagcgagcttcgagaagtcaagcaatgctgcacgccaagctttgaaggaaaataagtgggacatgcatctggctttgttagggtgaggactagggttagggttcggtctctagccgcatcattcaaagttttggacaactcttgtataaggtgttgaaatcattaacataaattcgtagaattttggaaactgataggctggaacgatcctctatcacaaggtcagttaaacctgtcccgtgtgagaaagagtgttcctacaacttcaagatgctgattatgtaaccgaggcagcccagccttctgtgtccttgtacacataagccaagatgcgagtaagactccaactaatgcagttgggcatatcctgttgctatggcttggctgaggaatctggatgctgcctaggattagtctgggaggccgcgtcataaagctttggggctggcaaaagaagtttacgaggtgtaagtgagctaatggtaaggcacttgctgggcagactcttgagactcggcttccagatcttactgtcaagtttgacacttggaaatacatatgaaataggagcaggaaatatacaactcgtggacatcatggtcccatgcaccaacggccgccttcgtgactccgaacccgaggaagccgttttaaaaccgcgggggttggcccatggtggttgctgttatactatagggctgacgggtgcgcgcttagggggggagcaaaagggtgggttaggggtggctggcagctgagcgggcattggacaattgacgggagaacctgggcaaaagacacagccgcaatgtctaccaaaaaaaacaacagccacatgcccccatctgcccccccatctgtctccagttgtccccgtcatagttaattaccttattagcggcgctctccctagccgacttgtacggatttacttttggaagctcaaaacatctcgacgtcgattacaactcctcgcgcaagcgccccctacccaaaaactcgttctgtgtcgcttgcctggcgggccttctttagcggggcatcggatcggtcaatgagacatcaccccgtcgccgcatgaacctctgtgacgtcggcactccacgaacaccaccagagttgaacctcgaccaaccttcggacgaagccgtgtaatcacccagactagcactagccgacgggcaaagcgcacttgagcgcacaccatggcaggcattgagcaattggaaatccacagcaaggtatgtccgttctgcctactgcatttgtcagagttgccgctcctcacggacctgacgcgccttgcactagctattccatatatgctgacagtttgtcttgtatcgcgaaataggcctacattgtacgatgggtcaaagtagatgttggccacaccatctcctggagcgtgcaacctcacaagaagtccatgtaatacctcagcccaatgatgccccaattgtcagcctgagccttatgctgatccaatcttttcacctagtaactttggcattgttaagcaccccgggaccggcgaaacgaatctgacctccttggccgacgatgcagggcttgccgatcaacacaccgaatgcgtcgccgagtcgaaacccggtctctttgcgaaaagggatgctagtaccgcccaagatcagctcgccaaaaagggctttataccgatacactggcatggaaaatgcgaagcagacaaggtctcggtcggcacctacgatgttacacaggctggcatgtttggcctagtttttgacaataccttctcgaagcaaacatccaagacggcgacattcgtccttctaacatatccgaccggcgcccctcctcagactgcacgaaatctacccaatctacaggcgggacctcttgccagcgcgagtaggacgagcttgggcaagcatggcagcccccggctcggtgctgctgcctcggaatccgtcgacagtctacccagccacacccgaggacgcgcattgtccacagctaccgctgccggtaagagtgagagcggcgtgtctagctcctaccatgttggcgtcctgctcaagaggaggcgcaagaaggggcagggctacgccaagcgtttcttctctctggactatacgacttgtactctgtcttactatcataaccgcaactcctcggctcttaggggggctattccgcttagcttggctgcggtcgcagcggacgagaggagacgcgagattaccattgactctggagctgaggtatggcacttgaaagcatcgaatgccaaggaattcagcgattgggcacgggcgctggaacgggcaagcaagattgctcggggggtggaattgcctgccactcaaccagtgtcctcggaaagtcaggggggagttgcaccggcacctcatatcaccattccgaacagcgcgcaagacgaggagagggagtggaggcaagttgaatctctggtcagcaggatggtaggcaccagagatgctctccgccgcctggtaaaggatatggctgtcgaaaagcagccacttagcggccatggatacctttctccaagcactcctacacttccagaggagaccgagggttatttcggcccgccgacaaccgcatcagcagcagataaaaagtctttctggaagcgcaaggctagcggcgccgcgtctcctctcaccccccagtctttccagacagctgccagttcctcgttgacaataccagcatcgggccatagcaccccaacacaaaatgggttcaagaaacaatatggtgctctccagcaggaagggccaaatactctggagaattgcaccgcgctgttgagcgatctggattcagtcgtgatggagttctcgactcttctcgccaccagcaaacggcgacggttgcctgcacaattatctgctcagccaagagcaagcattgagtcgtccacttcaacggtcgacgagttctttgatgctgaaggcggtgatgcggataggtcgacaaaccagctgatgatcatcgagcaccatagtgaggatgatacccaggcatcagatgttgaggaatcgatccacgagtcctcgtctgtctcttcgattgaagatgaagacgactatgctcagaacgcagagggtggtgccaacctgttcccaccaaagccgaaatcattgatcccccttccaatcacggaaccagtcaccagacgcaagacgatcccgccagccaaggtagcgcccccaagtttgatcgcgttcgtccgcaagaacgtcggcaaggatcttagcacgatcagcatgcctgtttctgccaacgagccgacgtcgttgctccaccgcgtttctgaacagctcgagtacgctcagcttttggatgcggcggctaagcatcctgaccccaaggacaggttgttgtacatgactgcatttgcgatctctgggttcagcaacaccagggcaaaggagaggtcgattcgcaagccctttaacccactccttggtgaaacctttgagcttgtccgttccgaggcagaagtgcctggtggtttcaggcttcttgtcgagaaggtcactcatcgtcctgtccggttggctatgcaagctgatagtgcgctgtggtctttctctcagttcccggctccgtcccagaagttttggggtaaatctgccgagattaccactgaaggccgggtaagggttagcttgcgtttgccagacggcacagacgagcactacagctggaccattgccactgttttcttgcgcaacgtggtcatgggtgagaagtacgtcgagccggttgggagcatgaacgtgaacaatgatacgaccggggccaaggctgtcatcgagtttgtagcaaagggtgttttcggcggcaggggagaagaggtcaaggtggagacgtacggccccaacggcagcaaattgggtgctgggttggcgggcacttggaccaacggactgaaagtcgtgccgggaaacaaggaaatctggaagccggggcagttggtcgagaatgcggtgaatacctatggtatgactacctttgccgccagtctgaacgagatcacgccgattgaaaaggggaagctgccgcctacggatacgaggttgaggcctgatcagaggtttgcggagcaaggggatttggaccaggcggaggagtggaaggtgaagctggaggaggcgcagagggtgaggagacgggtgttggaggagagtggggaggagtataagcccaagtggttcgtcaaggttgccgggggggagggccaagcgggggaggaggtgtggaagttgaagggagggaaggacgggtattgggaggagagggctagggggaagtgggagggggtggtggatatttttgctgggtagttttttttttctttgaggagacaaactgaagtgggttttggatgatggggataccgaatagacttttgggtggggtttttgtggtaggatttctctcttctctgtactcttagcaggcaggtgtttatgtgtcaattcaaggaagtattgaatgttcaaaaccaagtccgcgcagcgtggaggaacaggtttcttttgggggttagggttgtaggtagctcctggatctatcgccattcgcattttcagcacctcgcaaagctagaatcatggattgctcataaggtatgacggttagcacatttatgactgtctccgatggaaaagttggttttgggatctagtacgtccatacaaggaattttgtcggtgttggttgtatctaagtatagttggtcctacgtggacaattgaatacctacctttccaggttgtagccgtcctcaccttcaaagattcaatcatagcaaacattagccttttaacatgatcaagttttgttttgatatccgtctcggcgaaatcgatatcctctcaaaatccggtatgagaatacatcttggctacctacatctcccctcattggcgaacccgaaccccctcagttaggtagctcctcttttcccatccggccactcacccctcaagtaaataattccgcggcctcgtgattcgatcctcccccccatccatccaccatacctattgaccctcaaacttcccatgtctgtctgtctgggtggtagtctggcacgtggccagtctctcatgtaaggcaagtgcatggtacttcatcacatcacattcccttctcccaccccccccccacacacacatacaatgtacaacccacgacactctcctaaactcaacaacgaaaaagcatgggggttagtcttactttcttttctttttctttccttactgacgacatgaggctataaagaatcctttgtgtgtgggggttgccatgcagaagggatgttgatatgcatgggctctggaataggtagagagtcgacaagctttgttgatgttggttgtttcctgctctgctacctactgacgggagttataatacagataccacgtatataacccacattgtatcccaccacttcttatcttttgcccacctcgagagagcacgcctatacgagcgagccacccccaccccgcggtctttctcacgttgtcacatgttcgctatgtgtatgttgaatggctccattcaaagatcgagtgtaaattcttccacaaatgttgaagcgtgggaaatgtatacaggatagttggcgatgaaatcaacgtcgagttatcccagaggtggtggtgtaagtcagtagtcaaaagaaaatggacgattcaaagcacccatttccttcctttcaaacttttgtgtgctccttgggcttggggggctgttccaaaattccatttccccttttcggccggacccatctctgagctcgtgttgtatggccagccaagtagcgtaaagccgggcaatggttgcaccagccctcacaaggctcctgaccctagttcgtccactgatctgatcttaacggctcggtatattatattgaaagcaaaatgcagctctccacccccatctgtacccctcagatgcttctcgacgaggcctcatatcgtcccctcaagtcatcaatagcttcgtttgagatgcacacacctctccgcatcctgcattagacgaccgatcttgccatttttcaacccgaggggaatgtacaacagcagtccgagacaggattaactgtgggggcccttcattcttggtcatagatggcgggagcagtccgaggaacgcgcgcagaaaatcgcactttgctcgcttgtggacaatggctccatgcaaatactgcatctcacgagggggccgcagacgcaggaagccatccagatgctctgcaaccataacaaatatggctcaacgtgccagagcctaacaagtcgggcaacggcacccctccaacccgcatgctgaaattggggtcgtctcgcacaatggaacggcgggttctgtctccatgcacattccttcagagcctcgtctaccatgtggtcgtccagctgagatgtgcttctcaggtaggtatatgatggagaaggatggcgagtggcacaaaagctgtcgaacctttctgtatataaacatattacttgatgattagctgaagccgggacgtgatccttgccctcatcccgtcccctttccgtttccccccttttcctatttcactgcacttcactccagcaccctcagatgggcaatagaaacgcatccagtgcagatttgttgcacctgcaaccacattcacatgcaggcgacgtgtctctgcatctaaattgcatccatgataccagtttgaaaccttttgggccaattgagtgcttgctcagggatgatccgcgtaatgtctgtcaatctccaactatcgagcgaagtggaaacctgagccaagttgatgatacaatgcaggttcaacttttttccagcggctatcctggttggtctccgaagatgatgtcgagtctgtgctgccggcacgtagaaatggactcggcgacttgctagggtagctccaggtgaactccttgccttttcctttctcctggaagggtattatccccgagtcagagacgtcactgtgcccttccatgatgtgttgaacaggtggtacgctcagagagggccgatagtcggaataggacaatgtcccatccaggtgaatagaagggtcccaagagacaaacaccagggcattgaggcctccgggggaatctccacctgtggaatagaccaaggagcgttcatcccatgcccctcgaatgttgccggtaaagccatccggattcagtacggcgtacaaatcgaggagcacaggatctggattggaaatgtctggctcggcaggccaggaaacaacatctttgtgcctgtaaagatcatttacttcctggtcaagtgcatcttgggcgctgtagtcttgtgctacgggcgaaatttgccgttcgtcccgctgccccaggctagaggtacccctgggccgtcgtgaactgcctcggaagcggattcgttgatcattaggatccgtggaggtggggtcgtccaccacgtccaaaaatgtttgacatgctgaataatagcagcgaatagggctcttgctgatcgcgaacatcagagacgaggcgttgtcgtcccccggatgtacaaaatggggatctcgtgatggtggtgccgtgtactcggtgtgctgcagtttgggattcatggtctccggtaatgctgcactagggctcccagatgatgaggctcggccatttgttgctcgagcgacgtcggaagtggcctcgtcgaagtttaccacagtggtgtagtaagtgcgtctaggccagatgcgccctgcaagccactctttcctagactcaaccaccttgagctggcctgttgactcgtccttgaacatgcgaaggaggtaccacctgtcatcgatcacaccctcatgttgattccttctaaagattggtgggttcggtgactcccatttttgaaggccctctcttgtgaccgggaacctgaagcaggtataatgtgagatccaatcaacctcttccacctccagagcggcttggtttgagatgccgtagaaccagccatcaaagatctcaaaacaaactgtcgagcccacatccacacccatgacatcctgtatctcgagtttgtcactcagccatctgcgagcactcaagtcgaaaccccagacgacccagtaccggtacaggtccctgccgatctcggaattggtgccatagtaaagaaagttgttgtcgttgcgtacgaaaatcttggtagtcgatgcgacttggcggacggtaaccacctggccagtacacacgttgaaggccagaagccagctgacttgctcttggtttggcttggcgtgtgtgtacaagcaagaaacaatatcgtgggcgtagtgcagtacccggaccttgtacctgcgggtcattctagactcgggaagggccacgtggagaagggagcggatattgatgacggtctcctgtgttgctgaaccgtgaagatccaggatccgaatctcacgcttgcgaatatagcacagtatgccattctcgtaaagccatgtttccgcgtgggcgacgactctcacaagatagggagacacggacgaagtggcagcttggcgcttgatcagcctccgcagctgttggggccaacgctgagtgagtcttgcgctgcttgcctccaagctgtagggggcctttgtctacgccaccgtcagcgtcatcttttccgtgttttttctccaatcacgacaatacaagtactcacctcaaggattcgcttggcaatgcagtattccagggtcaaatactgcatccgcttgcaggtgagactgagattgccgacgtcgagcaaatccagatactcaataataaatgagaccagctcgtatggaagcttgaccagcgacatcaccttggaccttgatgtggaagattgccgtcaaccatcgaaaaagctccatggaccggagacagtggtggtgaggacagacaggtccggaagacgagacgtggcagagagcaaccaggaaggagtgaaggtgcggatcttgggattcaaagcattgtgactgctgctgagtgtcagaaccaaaggcaagaactgggcagtcgcttccatttataagggagacctgcccttaagaaaccaggaacggaaagtaggtacctcgataggtgaggtaagtatgtacctacttacctttgcttctcagcccaggcgaggctgggaaacaccgtctgccattagctggagctcttgcagttggagcacacaggccccccgctcactcaacgagactgcatggatatccacttccggaaaatcttcttgggttgtcgtcttgcagtttattcgctgagtaaaaggtgcaaatttcaagttcccatcaataacgagtctcgaagtgaagatcccctgagggagatggaggtggtttcggaatgtggaatggcaagagacaccgcactcggcagagggcacccacccttgttgatgcgtgatgcggctctgctcatgccctgagccacggatcaaccacaaacacctagtctggctggaagcggcgctatcgctcttgatgccacatgccccccttcccatccatgtatacccccgaaggacctaggttgcatcccaaacccctgtctagccgcccatgataccagccaaaatatgaccaccattgtgagtggcacattgatacctaggtacttaacagagccgcatcctctctgtttgtctcgctaatttcttaatgtttttgtgacatcaacctccttgtttggtgctccctccagagttgcaaagattggccaattaaaaatggcggagctgacctttaatgtggggtacattcagttgagcctcctttttcaagattctgactggcccccccacaatcatgctccgttaagcttcagtcttctgaacttcaacgcttcaacatcacaacatttacaacagaacccccaccaactaccgataacacagtgtgtttcctccgtatccgttcctcaataccaaggaccattgtttgcccagactatttatcacatttcttgcgttggatcgtcatgttggcggtatacatatacctgcaagcttacctacttaggtacaagccaagcgtgatgaggctctgctctcacatttcaaattcttggtgccgtccattgagaaaccgtttcaacaaccttccttttgtgcgtcatgggctttgattcgtcggttaaaggttgatgcaagctcttttaccccgcttactttactgtccttgtgagcattaattcttgctcaaaactgggcgctgtcttacctcccctcctgatgaggctctgctgtaggccctttacactagcttccatccggactggcacatgaagtttcagtcccgtgcctcctccaaatcccacctctctccccctctcaggatgtcaatacccatatgatatttcatttcagggtgatattagaccctgtcactgagactatcagcgcctctttacatacctctaaaatatgcataggtatctcaggaggccctcgcggcaaggtgtgccaggctacaatcaagccgccacaagcaagctgaagatcaaagatcgtaaggaattcaacatgtctttgcggcattccacagttctaacttgtcaagtgtgacaatctcaacaattttcttattgacagccttgccgccgccacaccagcgctataccgtgaacaccattcagcgccgacatgatatcgtgcgacaatacgctctgctatcaccctgttggctccgggtagcggcgaacctaaaaacacagaactttggctccgctccgatggcactacggtccggtttcctcggcaagagcctcagtccacggtacatcctgagggacatgcattctttaccagacttggaatctcggcgagcagtcttatcttgtttgagcctccgtacatgcgacttgggaatagggaattcggagtctgagagagcagacgaccgaaatcagcacattgtcgtgtgacccttcccgtcgaccggacgtgcgatcccgtttgagcatgcggtcaggcaaatacctgcctgtttgaagaaggagagagttcaaactccgtgggaacacgagaatccggatgccgaggtatcgaaaagctcgcgattacgtcaaggagaacattgccggaccaaggatggaaaaggacagtttggctacttccgtttctgtcaccgggctaggtcaaattacagaacgtgggcgagacttcaatgggtgtgtcattgatcgatgccgtcaagggctacccacgttcgcgtatcaacgccacatctcctcaagtatgggatggaattatgccgcatctttgcatcgatggctgcaaggacgtggtttgatcatctcgggaggatgtcctgttacgcgtgcaaagtttgtcaggtgacgattgaagggggctgtgtaggtatgtcagattctatgtgcctggggctggacgtgaggggtgcttgggactggcacttgaacaaaccgcagctcgaagacatcatgatcaaactctccaaaattttcacatcgaaacttgcgcctttactaaacttggtgtttgcccaacaaactacagcgaagacaccatctctgttgctccttgcccttggcccggcaaagcagatggcctggcaccaatcatgggtggtgcgggaaaatctaatgagttttcctccctcttgatctgccgtttcatccgtcttctctcaataaggtaggcccggctatctgcggtaccttatatttgataaattcgtgacactgtcacgtcgcacaaagaggccctgcagccttggcctggccattattgagcctcagggttgactgatagccacattctaacaatcgagggttaacaatgagatactgtatttcatagcggtttggcgcgggttaatcaccaagacgcacgctgcaccgattctcgaacctgtgcaagctgccctctttgccgcgagttctgcatcgtttgcgaagaactctagacatccatgaagctgcgttgctatgcagtataccaccaaccacaccctcagccttctgtgtgcggggccagcatttgcccctttttttacccctttttctatccaatgctacacgtccatctctgcagcaacaaaactgtggagatcacccaaaggtctgattaagcagccgctcacaaccatcacctgaggtagggcaaaaaaaattaatagcggataagtcatgtacatgagatgaggaatatggattagtaacaaagtagcaacgaaccgcattgtcgctgttgttctttttttttttttcggtcgtcaagtccgggaatatgacttgctcgatatcaatgaagaggggggatgtggggtcgggaagctatgacagcatcagcttggatgatagctcacttatcaacgtttcacttacatacatcaaacgtgctggaaagacaccgaggctgcctcatcacttttattcaagctgcgctgcttgcttgtagcgttgcgacattcttttacagtcaacaaacaacatcaacgccatcaaaatggttcaccaaccaccccctcttccactaggttcagacggcgaggtcgacctccgcgcccccctgacatcagataccatcctccaagtccgcaccggccgaatggctcctctcgctcccttgagcataaaatccggcatcaacaaaactttgaggtctggacctgttcaaatcacaaagttggggttggaaggtgacgagcaagatcctacgtttcatgggggtgttgataaggctgttcacgggtgtatgtcccctttttatttctcgacaaaaatgtacctaaacagtggctgataagacgaactacagactgcgcagaccactacaagtcctggcaaaaggaattcccccaagccgccgagaggttcgtccccggggggttcggggagaatcttgttcttggcttcatgaacgagaggaatgtttgcataggcgacatctttgagatatcagactcaaatgccgtgttgcagatttcacttccaagacagccttggtaggtaccatttaccccttaatccaccaaccacacaaaaccccttcttgctttttaacagtagtgttatatatataaagcttcaaactcaaccaccgcttccacctccccaacttcgcacccaacacctaccgcctctcccggacggggtactacttccgcgttctcactcccgggctcgtcgaagcagggaataaactgactttggtctcccgcccccaccccgactggactattgagcgcatccagcggtacctccataaggaaacagacaactatgacatgaacctcgagctttctcaaatagaagagtttggggccgagtgcaaagacaacttcacccggcgagtcctacgagcgagggcaaaagccaataaaaaaccaaaggagaagtgggtgccctaccaggtggtagaaagaaaggagcaaacgaagaggataacttcctttgtcctcgaagcggttgacaaatttgcggaaggggaagagaaggagctcagcccaggtgctcacgcaaagatcaaactgggaaagggcctcgtcagggcgtattccatcgtcgacggtgacaaagagcggttccagttggctgttgcccttgaggaaaagagccgcggtgggagcaagtacctccatcacgaggtcaaagtaggggatgtgctacaagtgggggctatcacggctgcggtgccgactgtttcggcggctagtcaccatgtttttgtcgcgggtggcgtgggtgttacggcgtttttggcaatggtatgtatgtcttggaaatgcagctttaggtcccaaccaaccaggctgacaaagattttctacaaggtcgagttctacaagagtatacactacagcgttgtcctgcattacgccgtccgatctgcagatgatgtgccgtttcgagaccggatcgaggagctgaagaaggaaggacagctggtgctctacgacaaggctgccgggcagaggatggatatacggcagatcatccagagtaggggttggaactcgcagctgtatttctgcgggccaaagagattgatggatcaggccgagagggaggtcaaagaacttggtgtttatcaaaaggaggtgcactacgaagccttcgaggcagacctgagcggggatccctttgaggctgtcgtggcgaacaagggcggggtggttgtcaaggtcggggaagacgaaaccctgctcgaggtcctgcagaagcagtttgaccagcccgactcgagctgctgtgtggggaactgcaagacttgtctggttgagctcaaggctggccgggttgatcaccgcgggacggctctgacggatgacgagaaggtcacatcaatgttgtcgtgcgtcagccgtggggttgggcgtattaccattgagatctgatggatcggccgggtggcttcgtcaggatagccggctgcatgttccggtctgcgtcagctgatgctgtgttgagcatgcgacggccgttcaaaggtgggtaaagatatcacccattgcacgctagaaatgttgaagaactgcacttgtgatcactcatcccgtacttctccccgagtcctgctacataaccccgcttgttgatgccggtagttcttcatcatcgggtctttgtcttttgggcgcctcatcaggcctcgccccaagccaaaaagagacaaccgctcctgccgcagcccacacaccacaataccatgtggtggttccccaacctggtcctgcttggatgtacccagctgtgatgctgccaatcgtcccaccgagagcgtatgcagtggtgaacagaccataggcgataccatagacccccttttcaccccacactcccggctgttgagcctcacgctcatcgatagcgtaggttatttctgccatgaggggtgtgttggccaaggtaacaagtgtaacgcccaacaacgtcaaaagtgcacaaagcaagaccttgtgctctatcgtgttacgcgtcacaaatcgaaggcagaccaacggcgggatagagagggcaaacccggcgactgaaaaccacttggcgccatgcttgtcggcgagcttaccaacaatcggagatacaaaaccggggaccatgacacagatgaagatcaggccggctgccgtcgagttccattcgaatgtttgtttaacgtagagcggaatcacagtatcaaacgcgaacctgtcagagaaatcagcactcgcaaggctattggcaaatgaccggcctatcggacccgatccggagcaaaaaggacaagttctcacacgatacacgcttcaatcgctataccaaccaaggcagctaacatgcgacgattcttgattagctcccaatgggggtgttttgcaggattcaggaccggcgtcgacaatgctgcaatcgggtcaccggaactggttccggctcgggtcggtgagggtggcaaggctgggtcggctcctgcctggcttgttgcttggacctgcttttccacatcttccctgttattggtaattgtagttgcactttcagcttccgaagactcaggtcctacgacccattgttgagcaactctcttctcgaccaacaccaggcggagagcgatatcgcaggctacaactgcaaaggcgatatagaacacagcatagtagccagctgcttcgtataccgccccaccaataaccggtgagatcagcaagcctaccgacatggcaatcgtgacatatcccatggcataaccgatgtctctcccgaccgtgtcgaccaacaatgccagcccaaccgaccaaacgatggcggcactcagtccttggagcagcctccccaccacaagcagggcaatcgtcttgctcagacacaacaatagggtagacccgcagagcgccaccagcccaagaagcagcggccatctacgcgatgaggaatggtcggcgtaaaacccgacaatcggggcacccaggaaaagagtgacgttgtaacaggcgagcaggatggcggtccattcttgcactttgttttctgccaacccgatctgttccaagaggctgaatgggaaaacgggcacgattaggccgtagaacagaatgtcggtgaaaatagccaaacagacggtgaggaggataaagaaggtggaggaacggaactcgaggaaaggcggtggtggttgttcaacatttttgcggcgggtgccggggaagttgataaatgatagtagacgtgaccgcttgggtgtggtagcaccagctgagacactatccaagccagtcattctcctgtgacggtaactcttagtaaatctcatcaactcggcgtacgttaattggaacttaaggtcaaggtatatatgtaaccactcatgaaaaatcaacgaagcatcctgggagctgaacgccgcttctcaaaaaacaagcagatttatagtcaaaaagtcattgacgaaaatggcggaaagcggcattgtagagctggtcatgatgtgaccgaatcgccagcagcaaaagaccaatcattcatacaaatcggaaacatgagctcaaagcacttgccccaattcatcgtcactaccgccgctccgataagctcagctcttatcgcctatcgcaggccaaccaatagactaacatggataacgccgcaaatgccaaagtgggtcacaaaagtttctcgaccttcaatcaaccactcaacccatcgcgaccatctcccacacgcgttcaccagccaaattcatccctacatcccacaaaatgccttcaacgccccccacattaggggacttcaccgtcctccccatctccatcccaccattaccctccttccccaaaccaacaacccactacctctacctccgccgcaacacccccaagattcccaccccaaccgactcccgctccctcttcctcaccaactgcccagtcgacagcaccgacatccacctccgctccctctttgcatcactagtgggacccggccgcttcgaatccgccacctttgaagacgagcgcaaagacaccgcccacaagctctccccactggacgccgccgtcccagtcaacgccgtccacctcctccgagcgcacggtagcaccaagaagcgaaaacgcgaggaagaagaggacgcggaaagaagcaaggaagacgaggccgccaggctcccctcgacgtggacccgcccgctacgaaggtcaggcagcacagcggtggtattactagcagacgagaaatccgtcgagcaagtcctcaaagcatgtgccaaggcttccaagacgaagaagtaccccgaatggggcgctggtgtcgctgataaagtccctgcgttgggatcagtctgggtcaagcaacataaccggctctgctaccccgaccctgccacccttcaacaagcggtcgacgctttctctgctgtttttgccagaagggagaaggaagccgccgagatttccaagagattgcgcaacgagccggatgaggatggtttcgttactgtaacgagagggggcaggaacgcaccggcgagcaggtccgaggcggaggaggcaaggaagaagatgattgagcgggcggagaagaagaggcaggagatggagggattgtacagattccagctgagggagaagcaaaaggaggagcaggaggagttgctgatgaggtttgaggatgacaggaagaagctggaggcgatgaggatgaagaggggcaagtttgtgcctgaggcgtgaggaagggttggaagcactggaagacaaaaatgagataccccaatggaaagcgtcaaggaagttcgaaatgagaagtgatattgcgaatggtgagttcattttctctgcctcttttcttcttatcacgccacaagactatgatgacgcacgcggggccatcagattatccattgtcctttggcgttttcacacccatcgaggcgaaggatgtatgctgtacaaaaaccgcgttacaataatcttctcaaacattctgaagtctttacctactactctcttacctcgttgagcgcaaaatctggaaggggttgcagtttcgactaacattgtcaattttactagagacctaatcaagtcaggacggagagtgaccatcacaactagatatcgatgttcaaggactagagaaggttaggtcatcttgacatagccttagtttgctgggctgcccttctacaatgtagcagctgcaaaggtgcaatgccaacagtattgtcgtatgagaacgagagtttgaggaagtttaaagattatccatccttggactcgtgatgattatgagtgatgtgggattagcactattgaaagctagtgccttgtggctacatgaagttcggcagttatcctaccagcgggctcttgatgtttgatattcctagaatgccagaagaccatcggcgatatccgccaggatcaacagttagcggctccatattttggattcttggacctgcgtcataggaatacacattgttgatttgacgtcacaaggtaacttcaacttcgtgatggatactcattaaacatacgaagacaaaaagggttctattttgccctttgtaaaggcatctgtctgtctattcatcgcagaaccattctttacaatacacgaaaagatttcgccttctcgacttgcaaacgccgccattttccccctctttagaagagaaacacacagaatgcaaccccgcccagtgtcctcgctgataaacagcccgtatgaaaaacccaaaacgctaaaaaggaatctcatgaagctcatctatcgctctgcaaaaccccacccatatgtcttgaaatcatcatctctagcccaaccagcaagctagccggtgaaaatgaggatggttcattatcctcccttccatgccccatgttatcccaggactcggcgtttatatcccgcccagtcccgacccatcgaggcaggaccctctagaagtaaagttatccggacatgagtcccttcacttcttctccttcttctcaaactttggcttgccgatatcgctccctctgagtttgacgttgaggacgcgctccatattggaaaggaccttctggtctggggtggcgtcaccgcgctcgaaggaggcgacgatggtgggggtagtgttgcacttggtggcgagatccttctgggtcatgcccttggtgccgttggggttggcgaattcggagcgggctttttggatagcctggccgacttccttgccgacggtcttgggcttgacgatatcgtcggcgcggtcgaccatggtgaggcgctggccttctacaccgggcttggaggcctggggatggaaatgttagttattgatgactacgcggttgttaaaagacgcagaacatacagcgttgccagccccgaacttcttctcggtcgcgatggcggcaccgctacggcgagcagcgttgagggctgattgaccgcggacaacagtctcacggggtccgccggcgccgctgcggacattctttccaatcttgactgtatcggtatcccaggcagacatcttgacggtttgtgtgggttgtttttgtggttggggacgagaagatggatgagttgctgagaaggcgagctgagtgttatcaagctggcgagatgtttgtttgctgtggtggaaggtgatgtctggtgtaaaaaaaacttccagaaagaagtggatgcaaagacaaaggttgttggtttgtcccggatggttgcagcgagacggtaaggcggggatttaaagaggtggcttcctggtcggcgcggaaggtgatgggcggccgtcgaaccgcagtgactcgagcggcgagagtggtccgcacccagcagccccgcgccacagggaggctgtgggcccgaccagcccaggcacgcagggatccaccggcccgacaactggtggagggcatgcccgtttggggattctgcaacttcaacaccaccactcggccgcgatatccatattgccttccgtccctgacataattcttactttggtctgaatttggtcctttgatattctaggggacctgtggcggttctaggtttcaaggggcacctaccaaacgacgctttggcctgcatcctccaccaacgccatgtggcggccaaggctgacaaagctccaggtcttttgaccatagacagcccagatggcaactggtgccgattttactttagtcacggagatacccaatgcttcaggacctgccttcactataactgttcccccaatttccgataggttggtctggtctgattccaacactccgggatttggacaacgccgatcttggcaaacctgttcgcatatcttgctgatgcaggctcccgaatggccagctagggtcgccggagttacttgagaacacctgcgtccgatatcagttgcttcgcatcctaaaaagcagtactggtagaacaaaacctgccgggtgcctcgccgagcaacactcctgaggatatgctcgttgactgcgaaggagttgtgccaagcaaaacctcgtttttggtggttgaagcaaactggccgctcttcgcggtctccatatccatccgagataattaccatcatgcaatgagcacgctgaggaggtacctggtggcacagacctcaagcttgttttcaggcatgagtaatggccgtcgactccacgtttcatggtcagatagggttggatgaaccatggcagcttactcacagcaccatactgacactagggaatgattcctcgtctcgatattcacctatggtttgttgaaagatgaacaaattcggagtattgttattcaaacgaaacatgtaccgtaaaacaaactgatgagggggtctccggagttcaatcggggttgtcggacacctttaaccaaacagacagtgacacagatatatgtctatgtcaatgctggaattctactatctcggtcccgcgctggcggatccgagtaacagtaacttaacatcccaataaataggtcaattccaaataccccgttacatagttggtgggattgttgatgacacctacctatatatggaaagataagtttgtggggttgcccaatcatgacaaataatttataccccgcgccaaaagctgctattgacaagacaggaaccgcaacgttttgtcgaattggtctttgtgagtccgatcctcgcggcaggtctactcggatgagaagctctcacaggaaacaaggagtttttccagtgcttccaaattccccattattacccgatccgggggaaccgagatgcaggtatttggaaaacaaccctgtgatagtaccttatctcactgttgtctaggcctgccgatccgccagcggcgcttgggactgtctcttgtgtcccgtcaggaacttgaaccggcccaggagcttattcacattgtgcattcggggcggtgggtgagttggtgctcgtttgagtatttaaagacgttgatcgtcccctctttgttgaacttgctctccatctttcatctcacaacctccagtctcatcaaactttgcttgacttgttaccttatctttcacttgtatatcttcacttgaccatatactcagctcaacatgcctctctccggacactgcctttgcaaagccgtcacctacaaggtcgacattgacgcccctctcctcactggttatgaccactgtgatgattgccagcgtcaatcgggctctacctactgtaagattatcccgtcattattcctacgtcactgcccggactcgaggtgctaccccaccaccgtttcgatcttatcagatcgctaacaaattcgatgtaacagcccttgtagtcgtggttcccaaggacaagcttgaagtcaagggacccgtcaagaagtggaagggcactgccgactccgggaatgccgtctggcgttggttctgcgaggaatgcggctctcccattgctcacgaccccgatgccgctcccgagatcattgccctcaagggtggcagcttggataccgagctcaagaaggacttgaagcctgtgagttattagtcaatctgagcaagaactggaagctaacagaagcataggacaccgagatctggactgccagcaagctccccttctgccaggagcacctggcgaagcctttcgtgcacatgccccagtaaatacttactatcttttctagtcattgattgatctggcatagcattcgcatagcaaactgggaggatagggactagcatatgaaggggctgagaaggctgattaaatgaatcgactcaactttatatagcgatggcgaaccagacgaaaacaagaagaaatccaaaggcaaggccgtgtccaagaccccagcgaatacgggaaccaagacctccaaaccagtaaaatcgaagatgcctaccccggcgaagacagctacaagtaagaataagtccacgacgcaagcgtccacaagtaagaccaagcccgcgaataaaaccaagaccacggcggcgagtaaagtatccggcagtaaggtagccaaggaggatgtcactgggataagacggagtccacgttttagaccccgtggcggagatccattcccgaagagtcccatgccagaatgggtttgaggagatgggccgttgtttggtccgccatcaaaacgaagtcgaggtaggtgaatgctgtaaaaccaccgcatatataatccctgttttactgccgaggaagtctccatctccaggtccatctattggggctaccgacctgtaggttgactcaacatcgcttgaaactgaaccgtcgcggaccaagaacgtcgtgtaacagtaaaaaaacagaagtaggtatcaccaccgggccagcaaatagcaagtccaaatttccgccctcgtacaactccgttcctagagccaagctgacatagcagcggtagaaaaagtcattcaggagtttcaggagtcaagattcgaaacactgtatctactatcaaaacgccagctaggcggcaaaagacaaaaaacacaatcccattcaactacatccaacatgagattataaataccctttcatgttactcaccttccataacccccctgaaaccaactcctcccaccttgtcccccttgctgtccctcaccaccctggccctgtggcctctcatcaggagtataaaatctctcatccgccagactcatcgggctcaactgcccaggatcactcccataaagctcaaacctcgcactatcactcctctgaactccccccccttgcccaacatcactctccgtaaccccactcacactccctatccccgtcccccccgtagccgtcgtcgcctgcctcctaacacccccctcggcaatctccacaggccgctgtatctccccgggatcattaggcataaccggcaccccctgccccgtaaaattcgccgacggcgccggaataggtgacatcatattcggaaagtaagcctgctggtcaatccccggtgtcgtgctcgccgactgaggattaggactcccaacatacccaccaccaccaccgttggggtaataacccccaagattatccggcggcgacggatcagaatacggccctggccgcgcctcaggaccggtgtactcctgcgtcccaaacggtacccgtccactctgcacctccgacgccgctggtcctccccggccgtcttccgtcccgccaatgaatcggggaactccagaagcggaagtcgcagtcccagcttgggtgcggcctttgtgtctgcggtgccagtaccatgttgctgcacctattaagattccggctgcaatgacgacgcctaccgctatgccggctttggcgccgacggagaggtcgttcgagacgtttgcctcgttgcggtcgatggaagagatgtcgcttcctgtcgggatgacggtcgtcatggcacacaccggggagccgtcagactgggaacaggcgagggtgttggggcagcagccgcctcctagactgctggcgcaggttatttgcccttgggtgcagcctgacgggacgggggttagtaaagggggggtggagggggcaatggtgttgaggcataggaaagaagtgccgcaggtttggccgtggcggcagcaggcgccgccaaagtctagggggcagccgtagtaggagatttgagggcattggcggcggcagcaggcggaggaggtggtggttacgggggtgttggagctggtgcgggtgacggtgacgaggcattggtacttgtctgctgcgcagggggagtcacaggtcgagccgatgcggcagcaggcggcttcggaggggttggtgctgttgatgatgcagctgtttggatgttagtatatgagccggtgtgtgtaactgtggctccatgacgccggacaggcgcatagatcctttaaagacctttgaactttaggggaagacctactattgattattcggacaacagaatcgttctcctggaggccccagctcgccgcctgtgatattgtcagtgataatgcttgagagaagacgatgagaacttacatggatgcatatcatcttgagggcatccaacctgcctcttctccattggaaatcccggtatggcatagaaggctcgcggcatcaagtatccctcatgtggaggggatgtttcgatcgcggcaaagcgttcatggctggtggtggtggacggaacagcagcgcggacgtcccggacaacgaacatagccgcaatgagtgcccgcgcaattattgaggtaaccatcgtgagaaggcgcgcaaagtaaactcaggctaattagatgagtaagtaaggcactgagaccatgactgagaacatcgccaccatcaacaacaacgccgccgaggatggagaatggggtgaaagagcaaaaactcgagatgtcaattcgatagttccatggtggtgtagtcgatggaaaatccaacccggcctggtttacgaatacatatgcatgtcagcagcacctcttcccaaacccttctcgtagttcccgatcgagctgtttggtgtgaacaccccccatggaaataaggacccagatcaccggccggggttcttcaatgcccgtggacaggggtcatggaggggtcttgagcgcgatggagctgtcgttgctacccttcctcttccagatgaagatggtggctgtgggttggccgaccgcagtcactcccagttgaagagccaatagtggcagaggatgcacgcctcccgtcttttgccctccaacccggatagatggcaatctataaaatggatttccgtaaggcggtgctcggtaaaggaattgtaaatgcagaaggaggaggccaacggctgctggtcttcacatgctagtttgttggtgttggtgaaagcgccaagggttacttcaagaatgtcagcaaagttgagcttccgacggggatctccaagcgtggtgtatggttcgctgatacaaggtgagagcatgccgtaaggtgagagctcacacctcacctcagacgaaccataggtaacccaagtcgaaaaagggtcctatttgtgagagcatattggcggggctctaggatgattagagagataatgggggtcgtggttgttcgaatcccatggacgagagtggtcactgtaaagatgttatgtcgttatcctcatccaaacacccattcctgcctcgtctctcggcgtaagaacgcaccgagtggccgtgaaatccatcatgaaatcaacgacatcactgatctccagatatgaattaaggttctggggcaccccaagggcacggtgctgtcaaaatatagtgcgggcccccagcggggtaccccagcgctagcagctggcgattgctataccgcataggacagccccgttaagtgcgatttcggcgtggctgccccgcgcactagggccagataccgacaaactgagccggggaacccctccgccgcccaccccccgtcccagcatcaacaccgcacatccagccaacgacgggcgtcttcaaaggggtcactgcaacaaagttgaatgccgcactgccgcagcttgacgtagtgggctccttttccacatactccacccacacaaccgaaactcgataaaccgattacccattccacgatagccgtcgccagcatggcccaggcctacgacgacgaggagctgtccatctccctgtcgccctctcagatccgccggaacaagagacagggcgacgtaggatacggccagactcccgtcggctccatcaacaccgccatcatgctgccaggcaacgccaacccccagttgcccatgcgcgacaagatgcgcaccgagcagcgcatcggcgcctacaacattgtcaagacgctcggcgagggctccttcggcaaggtcaagctggctgtccaccgcagcaccggccagcaggttgccctcaagatcatctctcgcaagaaacttatcagccgcgacatgcagggccgtgtcgagcgcgagattgagtatcttcagctgctccgccatcctcacatcattaagctgtatggtcctcgtaccaccaacatgtgatccacggctgacgctcgtgttatactcctagttataccgttatcaagaccccgaccgagatcattatggtcctcgagtatgccggtggagaactgttcgattacattgtccagcatggcaagatgcgcgaggatgaggcccgccggttcttccagcagatgctatgcgccgtcgagtattgccatcgccacaaaattgtccaccgtgacttgaaacccgagaacttgcttctggatgagaacctaaacgtcaagatcgccgatttcggtctcagcaacatcatgacggacggaaacttcctcaagaccagttgcggctcccccaactacgcggcccctgaagttatcggcggaaagctgtatgccggacccgaggtcgatgtgtggagttgcggtgtcattctctacgttctacttgtcggccgtcttcccttcgacgatgaacatatcccgagtctgttcgccaagattgcgaagggaagctacatggtaccgacttggatgagtccgggcgcatccacccttattaagaagatgttggtggtcaacccggtccagcgtgcgactatcgaggagattcgacaagacccatggttcctcaaggaccttccatcgtatctgcacccaccagtagaagagttcctcaacaccggcgtcgaccccaacaaggctatcagggtgagcgacatcgcccctggcgcacctccacaagagcaggtgaagctccacaacgaagtcacggagaagatcagcaagaccatgggttacggcaagagggatgtcgaggaggcgctggaagccgaggaaccatccgccatcaaggacgcctacatgattgttcgcgagaacaagctcatggaaaacaaccgtaagtgcacttttctttgatgtagccctattcttcctgttcgtagtgtgaaccccattacatgcctttcctatgtcattggccatcgtgagcctgacgggattgaagcaacccttggacacgacaatccatttgggtcatcgccgacagacaacatagaactgggtactaaaagcgccgaagaactctcagttctcacaccagatgacccgaatgcgagtcccatgttggacgccacaatgtcctcggcccgttccatcgcctccacgagcactggagcatcggcaaggccctacgttagcaaagtcggcatccttcccagcagtctgccggcctaccacaaggtattcatggaaagggagaaggccaaagcagaagggcaggataactttcccgatcaaccgccaattcccgagccaggggctccacgaagccaagcagaccaagaagagactcttcgacggctcaaaccccacagccgtagttttgtccgcatggaagatgcaaagcggccccaaggcctcacgccagtcaacccgccaaagaagaacaagcccgttcgatggcagtttggcattcgctctagaaacgcaccttgggaagcgcttgtttgtatctacaaatctctccacaaactgggagcaagctggattgtagatgaagactatgatctcttgcatgaggaggatgaacatcaggattacgacggcagacactctaggaaaccgagctcgtcgtcctataccgacccaaccaagcactacaagcttccggccgacccatggcatatcaagatcagatggtgcacagacagtatgcccccctttttatgccccctatctcttcttggccctgacagctatgacagcattccaaaaacattccgcggcctcgggcctgagcgaaacaggtcattcacaaccacaccacgtcaccactcgcggcgagaacaaggatcacaaggtggtggcgacgaggatggacgtacagatctacgagatggagcatggcgtttatttggtagacttcaaggtggacgggtacgaaacccccgagggcaagctgctcgaggacaaggaggtgacaagccccttcccattcttggacatggccgcgaggcttattatgcagctggcggatgcggattgattattgcatattaatagaattctgatatttccgcggatggagaagatcaacattatttcttccgtttctctttgttttgctgtgcatttgctgagaaggattgctgtttgtctgttgctttgtggaattcccatcacttgacggctggggttggaggacgaattgtatcattccagttagctggatctgtgtgtttgatacctgtctgtagtcgatatcggggctgtgccccctatctgtatcatcgacatgcaatgccggtaaggccgcacccgcctcataggcaagcatgttgaggtggacccatgggggcacaggctgctgttttagcttcacagcatgtgttgtgtgaaggagcctctccaatcatctccaattacggctcttacaactcgtggccctgtcatatggaaagcgaaccgacgaatcggatgtcaccatgttaatctatcctgtacttcacacaagagctgaagcactactacccgtctccataaggatgatctgctctaggtggaacgatacttatatcgtgcaccctcataaggctggccattctggcatgagccatgatccaggctgacttcagcacactgagctgtaacaatggcaactaactcaccacgatatgacggacaccaatacgcacaggtctcaggaccaccgtcgccgcaaaccacggcgacaggagggcgcgtttccatggagccgccgtcagtgctcctttcaccgccgagtcgttatgccagtccagtatcacctttcccccagaccgaacaccacaagaagtcgagcaatatcacattcgttcccatcgtcgatacggacgaagatccgcaatatggccacacgccaacgagaaaaccagtcactcggacttggtcggcaattggcaactagtggcctgagatcgccagctccttgctcagtctcttgtgtgtcccagccctcgttatcctcttacgcagctatgatgaccgcccgctctcagagtggcacctcattatcacactcaacaccgtgattgctttcatatccaccatctgccgaatgtccttcatttatcctctggtacaggcccttgctcagcagagatggaactggttcaaaagccctaggtctctagacgattttcgtgtatttgacgaggcctctagggggtcattgggcagtttgttgttgatgattagaatgaaggggaggtaagcaatcatgatttcaccacgcatgattgaatggtgctggatattgacaatatttgtatgaaggccgctgggaattgtcagctgtctcgtcctcatcacaagcatcgctacctcgactctcactcagtctgtcgtcacttacccaagtcgcatggtgcctgtcatgggcaatgacacggctgttgcgaaaaaagttgacgagttctactatgtctcaggcaaccgcgctagtaagtaggatgccgctgttgagacagcgtaactcagctaacatgtggccaagatggacgcttgtttccccttcagcaagccctacgaagcagcggttctaccacacccacacaacctgtgccctatctaccacccacctgccgaacttccgagtgcacatggcccgaattcaacaccatggcagtttgtgtaaacatgaccagtgcgtgcggagtacaaccccgagcagaaattcccaggctaatcactgcgggcagatgtcacaagcctcctcacctacgacgacctaatcccaggaacatccgagtggcacagaggcggcagaccaagaacaaacgtcagcctacccaacggagtcagcttccagccctacccctacagaaaagccggtcgacagatcggtctcgatgttggcatcggagcaggtctcacctccaactggtcagagccgcagcgagaacaggagattgcctccctctccttcaacggaacagaaggccagaaagccgagctgacgagcgttttcctcttgtattctgatcccatccgggcgacagaggtgatgtttcactactgcgtcaacagatacaacatgtcaatatcggaaaacgtgcccaagatccagcttttggagtctagtacaaaggtcgagtatcacgatgctgaacaccctcacatgtacaaaactcttgtcgatcctcaaaactcgagtgtgacgtacaaattcgggtcgacgtctaatcactttcttactgggatgctgagggattttttcgtggagaattccactgatagatcgatgatggggacgatgagggatatgttttctgtgttgctgtatcagctccctttttcgaagggcaacgacgatagagaggagagggatgagcaggggttagatgattttaggtatgatgttgttaggaatatgtcgttgaatgtggctatggggttgacgaatgtgtatgtttttccctccctttattatttccccctttgatcggctggctgatttgtacggatggcagtatgtttgacagcacgacgcaagctgtttccagtctggtcagtggcacggcttggcaggaggagaggtatatctctgttcggtgggagtggctttctcttgtggcggcgcagattgggttggcgctggtggttttggtgttggtcatggtccaaactgcgaggttgggggtgccggtggtgaagagcgatattttgccggcgttttttgctgttgggttggcggagagggcggaggctgagagggggcgggtgagtgatgttgggttttctccagaggtgaagaagaacggggcgacgccggaggagagctttgctttgatgggagagctgcagaagacgcagaaggggaagtgggttttggagggcttgtataggaggaggtgatcttgggagtaatagggagaagtaatggtaggtatgagggagcctttttggagctgcctgatggttacctacctatcgagttgatatgccttgaggcttgttgaccgtctttcaagacctatttaacatgtgatgaggcccagaaagacgattggaagaatctgcgttgaagacctttcggtagcttcaagtaggcccctgtatagtgtctaaggtatttcaacctcactgttacctagtataaaattgattggacaatgggacaaaggactttgagccaaagtctggcagtcgaagagagatgaatgaaccgaccaatgagcccacagacggctgcgaacttctaatatacatagccgagctatggaagtgccttactttattttccgtcttttatctcatactcaggcaatatcaaatgtggccgattgtacctcctgttgagtcacgccgttccacaaactgaagatatatttgcttcggggacgtacttcgccatcaagccgtgaagttgtatatcatcacggattggtaagtaggtacgccagcgtcttcagacgtgatgatgtctcccaaccaagacaccacggcacttaaaaaccccctcggggcaattttttggaaacctgtcaacctgcagcacagttaccgatatggcacaaaacactacacctcatgagaaaagtcccaatatcgacatgattcatcacgcttcactacggtcgctaggcacgatgatgcctggcccgatcgaagcctcgtccatggttttccttccagccagtccacataacagtccagcaacggttacattgtccgcaaaaagatctgtttctacactccggacagcagtcattaattgggggcaggcactgactagcattgcttttagtctttgcctgtggcttcccataatcatcggtatattgcacgtttatgatgggcgccctctggcggactggctgcttccaatcacactcaacgcccttatcgctttcatttcaactgcctgtcggacggcttttatcttctcattagtgcaggctctcgctcagcaacggtggtattggtatgaaagcccaaggtcacttggcgattttagtgtttttatgaggcttcgagaggaatatggggaagtgtgagactgatgggtacaatgagaggaaggtaagaagcctacaccagccttagaatttggcattccataactaacacttcctatacaggccgctgagtagtatgacatgccttgttttagtcacaagtcttgcgacgtcaaccatgacttaatccgccgtcacttatcccgtccgttttattcatgttaatgacgtcgagtctgctgtgattgcgagatgcattgggtcgagaaacatgagggcattgaatccgtaagcaacacttcctaaagcggcgggaataatacagttttgacctggaataaagctataaattcaagcgacttctcgtgagcagccctctaactctgtcatctcataattcggcatcacgagtaccaatctgtaagaccgcaaaatgcacatggcccgagttcagtaccatggaggtcggcgcgaaaactgcaggtaacgaacgggataaaactcaagccagtaaaaccaacccccgacgtctcaggaacctttaccatggccgcagggatcactgacccatattggtctcgttcaagcctctcttcgctgtactttaatgggactgatgaacataaggtgcaaatcgcaagtcttttttgccctggcagatttgccgttctatcgcgcatacgaagtcatattctacgactgcgtcaaccgataccaagtatcagtatctgaaaacataccaacgacagaactgatttcgtcaaccgctcatacaaacgtcggtgacggtgggcagtggttgatcgacaaagaagaccctcttatcacatacctggtttccaaaggctatagcacattcacgtccaagaacctgaacgacatcttcctccaaagcaatgagttcggacaaatgctatgggagtggtggtcatactataataattcaaaagacggacaagattgtacaagccaagagttgcatcttgactccgttatccataaaatgtcacagaatcttgctgctgagctcaccaatgagtatgtcagactttcgcttctcagcttcaagcttcccagcgcaaaaatgatatcgacctctacccactcatccgagcatctcagctaacaatcttgcatcacagcctcctcgatcccaggagtgaggatgttagcctcgcgttgggaacagcatggcaacaggagatctaggtctcagtccgttgagagtggcttttacttatcgccgcacaggtttatctatctctcattgtcctcatactggtcataatccagacatcagatctcggcctccccgtggtcaagagctccatcctgcctgttttctttgctgttggaatggccgacagaacgaagatagagaatgaacatgagagaggagctgccggattagccacctctggcttgacagacgaggagaaagacattggcccggaaaaggcatctaaacggggcaagaagatggacaaaacaacacccaaagaaagctacgccttgcttggggagctacaaaagacacagaatggaaaatgggctctcaggagtgtgtaacgggaaggctgacgataagcgttccaccagagcttcatctcgatctaatacaaccagatattctaacaagacaatcaacaagggatgcgaacactagtataaatatatacaaaaggctggacaatatatacaatgataggccttacagcgcagcacacatggaggatcgatattaacgaaagtgaaacatcacgttctcagccccaaacatttcttctgggagatctattactcgttgccttgtccagcaagttcgactctatcctgccctaaagtctcccctcctccaaaacctcgatcagttcatccaacctctcaatcaccaaatcagtatgctcatggtccaccaaatgtctattcacatcattgaccaacaagaccgtcttggcacccgccctcctcccagcagtgatatcatccactgagtcacccaccattatcaacccactcgcatccgccacctcctctcccttctccgtatggagtagctccccctcttcttgccccctctcggcaatcttttccttttcctccgcctcatcaacgggaatgccaggctcaccagttgacttcctcaccaaaccccaagaacgggcaatatggagaataccagcggggtcgggcttgggagggcggaaatcacgggtgacgatggggccaaagacggaggaagggaggaatttgtcaaggaggttctggacggggaggtcaaagttgcgggtgcagattcctttgcggatggagcgggagtcgaggtaggacattaggggggcgaggccgggttgggggacctgggtcagcatggcttcgcgttctatggtgcggattttctccatggcggtgtgttggtcttcgggggtggggagggagtagacgtggtcgaggatatcgactgatttggggatgccgagggcggagcgcatggcggcgaacatgtaggtttggggttcactagttttatgttagttggcatgcttttgaggttggggggaatggaagtgagagtgaaatggtgggtgagtgagacatgatgggtgggaggtatgagatgtgacaggtaatatggggcaggcttcataagagctagaggtcgaaagacacaacctcgaagtctgactcagggactcaaagcccaggctagaaacacaaataagctcaccatagcgtcccgtcgacatcaaaaacgatgccctctagcttgcgggtgttggggctaggaacaaatggctgtttcaacggcgcgaatttccacggggctgaagtaacggcggacatgatgggccaaaatcttcgcatcccaccgtctggaagttacttgaaataaaaggtgcggggttgccaacaaccctatataaaagttgtaaagaaagtgagggtatcacaatatcgataattgatgaggggctcgagtgaggatccaattcgtaaatgccaagagatatagctccaaaaagattgatgcttaaataaacggcacaacaagaggttaggtaccaaggattcggaatgacgagaaaaggcaatcaatcagcagctcaatgtgaaacagcactcgtacaagtcacactctgtcaaaagaagtctcacttgaccccgcgatttcaccttttgcttgctctcaaagcgtccgttcttctagaatgttttagggctggtacgtcactggctgcgattaggcgatggatcacctgcgggcggcttgaccaaccgaacagcgcgcaaaacaccccggtccggcagcccccatgcacggcctgacagggcagttttagcgggaagtggccgcctttttctttcaaggatctgcgggcaacacaaggaacctgcggcggggtgcgacaggaagaccagagacggatcgaacggcggcggcaagctgaggcaagctgtgggtggtgctgctgcccgctgccggaagctgcacctcagcttgatctgggaacctgacctgcctgcccaagtggaagaagcatcaaagaaaggaaaccaggaaccagcaaaaaaacaacctccgaattccattgcatacctcgattcaaaccaccatccgaactctctgacggcgagggacctgttcttttttctcccactcgtgtcccttgcatttcccctttccaacaacatcaacacgtctctctttgcgtctgcgtactggagacttgttgttctattcctaagccgctcacccctaggttgttcgaagcttatcttcagattgactatgaactgctaaatgagctcctctccgacactgccttcgccaggccaatggccaccgcgaaggccctccaaaagaagtgtatgttattatactccatcacgcgacatgatccccaaactaatctaacatcctcagaaactgcgcaatggcaccttcatcatccccgccaccggcgagcgctcccgccgcgtcttgaccctccgcaccaacagctccggcctatcctcccaaaccgacggcacccgttcccgctccctctcgggcctcaccaccttcccctacgaacaaacatccttctccgaccgtttctcccaccttgcgcgacaaacccgcgagaaatgcgcctggatcctccgctggctcgactcgcccgtcggccacggcgtgctgaaatgcacgctggcgtacacactcggcagtctggctaccttctgggcgcccatctccgactggttgggccggccggacggtaagcacgtggtggccacgctgactgtttattttcatccagcgaggtccgccggctcgatgattgaggcggtgctgattgccattgttgcggtggtgtatgcgcagattgtctcgattttgtccatggcgacttcggtgctggtgggagggcagtggcattgtgttcccttggcgcatgcgctggtgctggccgtcttcatagggggaggatttgggtttattggttgggtgaaacagcggatggggaatccgttggtggatgtggggagtacgctggcttcgttggcgattattggggtggtgaccaaggagacggcggtgttgacgggggtgttttcgaatcaaaagatcattcagattctcaagatgttctttttgggggtcagtgctactaccgcggttaaccttttggtgtggagggtttcggcgagatcgttgttgagggacaccatgaccaagtcttcgacttcgctgggacacatgctggccttgattacgagtgggtttctcagtggctcagaggaggatgtcacgtcgggccagtttgcggctgcttcagctgcgtacaaccaggtgtatcctcagatgattaagaacctacgggagtccaagtttgagcggtatcttctgggtcaggagaagctgtaccagcttgacagagctgttgtaaggtctatggaaaggttggcacagtcgattggtgggctcaggagcgcggccaacacgcagtttgcgctgttgagagagtcgatgatgcaggggtctggaatgatgtctccggcggcgtcgctctactcacccgtcttgcagcggacgttgtcaaacccccttaagagcgggaaagggtttggtattttgtccgcgattgacgaggcgtcagacgagagcaacgaggacgagagaggccgtgttaaagaccggcgtcgatcggatgctacgactgctagcatcccgttccgcaactcttctgatatctttgagctctttatcaacctgctgggtccgtcgatgaagtccttggcgtatacgctctccgaggtgctgcgcgacccaccatttggcacggcccccgactacgacatcactatcaatgatcacttccgccagagtcttaccgatgctctgtcactcttcaacggggcaagggcggacgctcttcaggagttgtacaagcacatcgagctggatcgtacgagatcggccagtatccaagccgactttgaagaggtggcggcggcatgtggccacttcagttttagcctgcaagcgtttggggaggagatgcaaaagtacctcgacgtgctggatgatttgaagttcgccaatgagcacaggttacggagctggcattggatgaagtggtggggcaaccgacgcggatacaacaaccgcaagatcacgttgccgtttgaccatgcggaacgggagacgctgatcaagccgatcaagaagagccagatgccgaggggtattgcggattccatggtgcagagacgtgatacgtatgcatggagtgctgttcctgggacgaacaaggttattgctacgctctcccagaggcttctccgggtgttgagaaaggtggcgagggatgacagtgagttaaatttctagctgctatgaaatatgcccatgctaacaggtaaacagtccggttcggcttaaaagtcggggctggagcagcattttgggccatgtttgccttcattccgcaaactaaggatacttaccagcactggagaggcgaatggggtctgctgtcgttcatgatcgtgtgctccatgacggttggcgcatccaacaccacaggctgggccagatttatgggaacggtggccggtatctcagcatcgggcttcaactggactatcagccaaggcagcacactggcacttatccccctcggagccatggtggccttctgggcctttgtcgtcattgtcgcttggggtaaggctccgctgggtagaatcacgctcctcgcctacaacgtttcgaccctgtacgcctacagcctgtcgcaaaaggtggatgacgacgacgacgatgaaggcggctcgaatcccatcattggggaaatcctcctccatcgtttcgtggctgtcacggctggtatcttgtggggattgatcatttgccggctggtgtggcccatatcggcacgcaaaaagttcaaggagggcttgagcatgttgtacttgcaaatggggctcatctggaagcgaggaccgctggctatcctgctcaggagtgattgttcccggtcctatctacggtctggtgagcaggctgctctccaaaaatacgccgcccggctggatgcccttcgtgggagcgcgaccaatgagttcgagctccgaggtccctttccagccgaacaatccgctcgtctgatgggctgtgcgcaccggctcttggacgcattttacgccatgtcactggtcacgcagaggaagggcagtttaacggagggggagcgagcgctgctgatgtacacggctgacgagagagcgcagctgtgcgaacgcatctgtcatgtgttccaagtgctggcttcttccctgatgctggagtaccccctgacggacgcggtgccgagtgttgaccggacgagggacaggctgctggccaagattttccaattccgaaaggaacacaatcctagcgtggtgctggactattcttcttctaatgcgggaagtggtagtatcgggtcgtcggggatggggttcggaggactgctgggtaagctgtcgcatttgaacgtggaggagagagattatgctctgctgtatgcatatgccttggtaacagggcaggtgtcggaggagctcaaggtggtggccaaggagattgaggggttgtttggtgtgttggatgaggatgcgcttttgttgcagtaaatagggtcaagattgagtacgataagggagtgacggcgggctaaaaaaggagttggtttggtttgggtaggatgggcaatgggaacaggaaagggaatttttatgggaaatagcatggtaatgatacctaagaataaatgacatagatgtacaaagttcacttgaagcctttggtgacgttggtgtggaggtgttgtccgatgcctggctggagtctgatgttttgttagaaaacggactttgactttgaactggcaggttgtcatgggcaccagtcactgaactcatcccgcgatatcccagacttccccagacttttgcccgccactcatgatcatgacgctgttgacatctcgcgacaacaggcaggacgaggtcaagaaaatgccaaggaaagacattcttgttgtctgattggacaatggttggctgacaatgggcctctgtggagcgctgtctgagctgtgacccgcctgtttcgcgtcgtcgcgaacaatttacgcgtgaatgcagcgcgtcgcgccaggggcaggaatcctggatccctgcctttgctccttcgcgttcttcactttttagcaatccactctcgacttcaacctgcacttgcttctgttttccctccattcgctcttcccagctgttttcaagacatcgttctctacccaaaagatacccagctgtgacttcccatcaactcctccaacaaaacattgcaggaaagaaagaaccagatcaccatgcctggtttaataactccccgtaggacgcggtccaccgtcaagggcaccaagatccctcctgccacgtcgagtattgccaacttaacaaagatctctaagctctcgacccttgggaaggacgtcacttccgagaagaaggccaccaccggcaccatctttggtcgcacctccaacattgagattgtcctcaccacaaagaagaggaaggttcaggatgaggtcgagcccacacccaagaagcaatgtcgggagcccgagtcgagaccaatcacgactaccattcctgtttcgaaaaggaagaagactgtcacattcggcctgactgagaactccgccccggccaagccaactccaaaacgcgccgctccggcatccacacccagcaagaagcggtcataccaagccgacgacgagaccgatgcctcttctcacacctcggctcttctggaacgtctcaacatccgatcccccatcccgaagcgcaccaagacagttgtcaccccagcccaaaatgattacgacctcccccaagagctcctcgacctcctcgacatgcagaccgccttcctcaagaccctgaacatggaatacgcccacaatggcaccaactcccccatcgacctccgaaacctctaccccagtgtcacccgcacctggggaaagcgtagagtgttactcgtcgacattcagcgtctgctcggagtcctaaactggacacccgccaagtcctccctcgaaccccttttcatcctctccgactatggccgccagaaaatctgcatcgacttctccccatccctgcctgcgggcccgatcagagaggccgacttgaatatggatttcaagtccaacctccgcacgttgtggatgtcctccaacaagaacgtcaccctcttcctcggcaccctccccaaggctccaatcaagaagtgcgagagccttctcaaggccgcgatcccaaagcagacaacccttgactccctcaaggctggtatccaagccagaaaagaagccgagcaagccgccaaggaggaagccgccaagaaactcgagcaggcggtcaagcctgacggaacaaagatgacgctgctggagcggatcaagatgaaggaggtggagctgaagaatatgcccgcgggtcctacgcctcaggagctgcagaggcaggcggcgcttcacagggcggaggatgtggcggccgtgattgggatgttgtgcaaggccagtggtgggcaggcgagggtgtcgtttacgatgcagcaggtcctgaccaagctgaaggattcgctgaggacgccgattagcagggaggacgcggggatttgtgtgaggttgttggcggcggaggtgacgcccgagtggattagggttgtgaagctgggggcgagggagatggtggttgttgctgttgctgggcagcctagtctgacggtgttgaaggagagagttggcaagttgttgggttgaggggaggttgagattagggttgtctgggtgtggcttgaggttatttacggaaagggtgggggagtctgggttatggcttgggaagatgatgcgttctttttcgaaatgggaaacatgaagaaggaaaaaaaaagacatggtgatacccctgtattttgttggggaactttattgtataaatttctgggaatggggactttgggggtatgttattactactacttttataactttgcattttggggtgggcatggcattgcgtttttgttgtacttcatgggaaaagtacgcgcgtggtattatggcatagcatagttggactgagaagtctgtcgtgtttgaatgaagaagagtcaaagcaagagttgtgcctggtgggcttgatgtgtgttggtgtggagatatatactcatcactgcggagcaaagcttttggaagagggtttttgtttgtgtttcaaacagcaagacgtaggtaaacactttgggactttctgactgagatggtcatttttgagaggagagagatgcatgcatgccattctcaactttttccgaatggcacttgaaagatagtccgccgacttttagaaatccttggtaggtctccgaggatagttgttgataatcagttcagggtattcaaaacattccatacctaccatgatgcccaaacccagtgtaacaaaagcgtaagcacaaggatctcccataactgctggctagataggcaacctggaatacaggcgcacagtgttcaaccaagtttattgcacattgtacaaaacccctatcatcttccatcttgactccccttccagatctaacaaaatcgcctgccgggcttggcacacaatatccatcgtccgccccatccatccaagcagcttcccaagccccccccagaaaaacccatccccccctatcctcccgtttaggctgggcgagaagtgatgttgtagttaggtcaggacagctgttggcttgattaagaaggcgacggcataaacgtgatctggtctgctgatatagaactggtatttcatcgctgaagctatggaaagactctttctttttgtgcccacgattctgaacagatcaggggtggagaaaaatgtgagatgagagaaaatagtgaagaaaatcgaggagaaaaacaagtctgaaaagagatgatgatttgatgcaaggaaacacccttttctcgtacgaatggtttctcttagtagtgcctgccgcctgaggacgaccccccggccccatggcccgtcgtaggttttcccttctcagctcctcggaggttaactgtcttcgcggcgcaggagggagaggtccgctgggaggagctggtcgcatgggcaacgacatggtggttgatttggtggcggtactgggagatgatgtgcgttgaggaggagccatgctcggggacgctgtgcgctgggggggagccatgctaggagaggcggtgcgctgagggggaggagctgtacgttggggaggaggagccatgctgggggagccggtacgacgagggggctgttggtcttcataggcaacagagccagagggcctggatctgtgctgcatcaccgagttcgtgctggctactcgcggtcccagtcccggatgtacattcgctccacctgcgcggccaaggctgattgatccgctgccgctgcgtggcgggggtcgtgtcggtacgctatcaaattggtcacgaggtgacaccatggtccccaagatgggaatctcacctgaagtgggtgtttgctgaacccccccctcattctgtgctgggtacgatggcgaatcactggagcgcaggagatcctggatagccggagagagctgcggtgccagatgggacttgcggttgtccctatccataagaccgcaggcccattccctcagatccacaggtgttctcttggctgcttgtacaaaaggatcgcggtcctgtgggttgggtcagtgtcggtgttgagtaacatgctaggtgagccatcacttacaaaaagctcttgaggggttggtcggcgctcgggttccttgtacagacacttctgaatcatatcatcaagaatctgagggaaggcgtcgctcttgggtagcctgggcgcgggctcgtgtacaatctgctgaagcaggtcaagaataccggcaggggcgctctcggcatcagagagttggtccgctgcggcgaatgggaactttccaatagccagttccatgatggacaagccgaaactccacacatctgacttgaccgtatacttctcaccctgaattctttcaggggccatgtatgttgacgtaccgacaaaggtgtcagcgatcgagttgatgagctcaccggatacgccaaaatcgcagagcttgatggatcctcgcgagttgacgaggatgttggagggcttgatgtcgcggtgcatgatgtggtgttttgagtagaggtatgtaagacctccaagagtcgcctcggcgatcttgcccaaaacatccacacggacgggaccgaatactcgtgataccctgtccagagagctatccgaattactgtcagccgtgtcaaacaccttgagagcaagaatacaacacacccgacatccatgtactccatgcacatgatcacatcgttgttctcgttcaggaaagcgccgtagaaggtcacgatgtagtcggaatggcagccacgcataatctgaagctcacgaactatgcgcttccgcatctccttcttggcctcgacatgaatgatctgtcatttggaggttagaacacccaaggagccaagcaagccaccttacgaagactaaccttgcgggccatcactgtgttggtcgggatatgcttgactttgctgacggttccaccattgccagctccaagatccttgatgatctccaggtcttcaggcttcaagtccaagttgaactcgataccaatttctagctgttcgtcttccccctttgggcgagcattctcggcggtcgggggaggcttaggggcggcaggtgtcagagcaagacccttgacgttcttgcgcttcatagagcgcggggcgaatgcgtcagccatggtagacggttcgaattcgcgacgagtcttgtgtttcgattgtctggaattactgagcgcgcgccgaacctgatcgcaattgcctgcgggcaggaggcaacacaggtggagtttgggctcggggggctggcaggcagctttggaccgttcgtcgggcgccggtgaaaagtagtctgttgctccgtggtaaccctctcagagctaccggagactaaagataggtattactggcaacggattctcgcgtacctcctcggggtgctgggctcgtcgcgtttagtgagcggtggatcgggcaaaccacagtgttggagaggtcctcgtaacctggaagtccttgaggcggtatacgtatgatatgtaggctacaaggcaggtagacacagacaaggcgcagcacaggttcaaagagatagtgagtgaggccttaaagcgatggcagcggagaaggaggtttcattcagaaaaaatcggggggatgtggacgtttcctaagactgagtgtcgcggacggtcagtggcagtcaatgtggggttccaggaggtggcctgggctgcgaagagagaaacgaggcacaaaggaggggtggtgtccgtgatcccctgcgattgggaggagacaggggatgagccaggggcacgtcccatcaaggtgccctccacctgccaactgccactgcacgctcaccaatgatttctagagaacggctggtttgccgccaatatttgcaatgtcttggatgagagtcagcagtaaaggaaatgcgactggatttcccaagatgcgaataaaaggcgcagagttgacttatcagtattgtccatgtctctcaaagcacagtgtttggttgaaatggactgcactgtgtaaggtaaccaagactttcagttgtgatgggaacccaactttgaagatgggctggtagctactgtaaacctaggtggtaggtccgttcgttatggcctggatctgaggtcattttattacgaattcaatatcgaggtgcaggatgaacggtccccttgcactggcaggaaatctcgaatccgcggcgagaaataggggcaggcgtgtttcgtctggttttggtttttggtaaaccatgccgtctggcttgattgggaagatttcatgcgacctctatatctgaagagagctatcgcccacgaccgcggagataagcgctgggcgtttaactgcccactgcgtttgggctgctaccgccacgctacagccgtcctcccttgatgatctcatccctggcctccaagagccgagtcgttcccggcctccactgcacatcaaggagtttcctgggtagcttccgcccccgcgccgccccgctgccggggaagcgaacgccgaacccacgtgcgtcaagcccgggatgctattcccgaccgacctgaagctttgaagaataaaaaagtgagatactacatagaacagagacttgaactgtagttggagacaggggacagtgtacgttacacatcatcaatatcagggatttctgagaatgatattacagagcttaaaaatcattgggatgcggcaccagtgtgtggatctgaaatggaaagtattcttcgttaaccagcaattttaaaggatgccgggattttgcgttggaatcgagggaatataaattcaaagcagcatgtattcaagattgtgcgttggctactgggcgagaacagttaaagttgaatcccaagtcttacatcactggaccttgaagcacggaccacctacatactctgcacgattacaggcgaggctgaacgcgtcgtggtgccacagttggggcgtgcgttgctccaaaaaaaccaatcttcctggcttcgcagcagtgtcagccttcccgtctgtgtcgccggcaacttttggcagcaggcagccagaacctttgagatccccaccactcgctggacaacttgcgccggccactcctttcccttttcttttgctttctttccttctacaccacacgcccgcgcccaattgccagcggcgcttcccactatcgcaagtgaccgctttttggccaagcaacaaaacgcgccaacttactccgtaatactgctgcagaccgaccttcagtttgcgcgatcccaaccacgaaaatgagcaacgacttgcgcaacttgatcgatggcgaggccgagctcgatgacgaggatgatgatgcctcctttgatgaggaggccggcgagggccgtagggacaagcccttaatcgatgattccagcgaggaagaagatgatgacgatgatgaggaagaagctagaagagtatgctccaccttcaccatgcgcccaccatccctagtttctgttgctaattcatctttgacgtgcctagattcgagaaggcttcattgtcgatgaggacgaggaggaagaggaggacgaagatgtcgaagagcgacgcaacagaaagaggcgtcggagagccgaaagagaagaagagcaactcgatgaagaagatctcgatctcatcggtgaagcaaacccagactggggacgcaaggcacagccccaggtacgctcagccagttgatcataccaacattcatcatgtgctaacaccatgtccagcaaaacaagttcaagcggctgaagcgcggccatcgcgatgaggatcgtggctccgaacgccgcggcctggccgagatcttttccgacgatgacgaagaaatggccgacgaccgagcctatggccgccagagccaccgccaagccgacgagttcgatgacttcatcgaggaagactaccccgaagatgatgaggagcgcatccaacgccaggaggatatggaagttgcccggccgagagataagggtctcaccgtcgatacgactggtctggataaggaggcgcttgacgacatggaagctattttcggaaatggcgaagactacgactgggctctgcagatggaggaagaagaggaggagcgcgaacgtgaagagcagcagatcgagctcaaggatgtttttgagccgtcgcaactcaaggagaagctccttaccgacgaggacaacgagattcgcgtcaacgacgacccagagcgtttccaactggatcgcaagcctttccaacatcagcaaacttcggccgaagggttcaaggaggaggccagatggattaccaacctcatcttgccacacaagcgcctttcaagtgatcttcacggacctttgaccaaggctgtgtgccaggtactcgagttcttcgtcatcgacgcctatgaagtgccctttgtttttcagcaacgccgagactacctcattcatgccaagaagtcacgaaacttggatcgtgatgatccggatgctcccgcattcaacattgatgccgaaaagttgcttaaccaggatgatctctggcgcattcttgagctggatatcaagttccggtccctggttgagaagagaacagtgctcgagaaatcatacaacagcttgaaagagaagctcaacatccaggacgacatcatcgaaagcatgactcgtgcggccgaaacgacagaagagttgcaggatctacaggattacttcaacttccggtactctgccgaaatcaagcaggctgctgccatggccgctcaggaggagggtcaccagaccgaacagctcaagcgtccgggcaccaagacagccctctttgagcgcatcaggaagtccaaggcctacgagttcgtgcaggcgctcggcatctcgcctgatcaacttgccagaaacgcgctacaagacggaaggagggtttcatctgatgacaatccccaggaccccatctcgctcgcggatagcttagtggacaactttttctacacggccgaacaggtcaccaacgcggcccgtcagatgtacgcagaagagctcttcgtcagcccccggatgcgcaaattcttccgtaaaaactactacggcactggcattgtgaactgccgtcgcacagaaaaaggtctcaggaagatcgacgagtctcatccatattacgagatcaagtatcttgtcaactacagcatcatggatttcgtggatcggcccgaggtgttcttgaagatgatgaaggcagaagaagaaggcctggtggaaattcgcgtcgagctcagcaacgagcgtagctttaggaagaatctttaccaagatttcgtatccgacaacttcagctcgctggctgatgcgtggaatggggagagagaaaaagtgctcgacatggccattaaccgtctccacaaggtgattgagaagggtgtcaaggaatccatacggactgcgtgccaggaacggcttctccaagcctgccgtgaggagtattctaagcgtctcgatcaagccccgatcaagcccaagggcatggttctcggcacagtacctcgagtgcttgttctcaccaacggcatgggcgaccccggccgcgaccctatctactgggcgtgtatggacgagcatggcaaggtgaatgagtatggcacctttaacaacctggctcgggatgagaaccaacgcgaggagtttgcttcgctttgcgtacggaaggagtttgacatggtcggtatttgtggcttttcggcagacacacaacgactcatcaaagacgtcgagggcctcatcagcgacaagggtcttatgggccctccctaccctgacccgaaaactgacgagagtcgtgtcgatctcttggacgttgttgtcgtcaacgatgaggttgcgcgcctgtacaaggacagccctcggggcgtcacagaccaccccacgttgaatcctcttactcgctactgtatcgctttggctcggtacatgcaaaatccgctgaaggaatatgccgctcttggcaaggatgtgatctcgttgtcgatccacccataccagcaatatctcccgcaagacaagctcctcaagcagttggagacggcgatggttgatatggtcaaccttatcggtgttgaaatcaacgaagctatgaaggatccatataccgcaaacttgcttccctatatcgctggtcttggccctcgcaaggcgcagcttttgatcaagggaatcaatgccaacggcggtgtcgtcaatgctcgtgacgaactggttggtgatttctctcgccacaagatcccagtgctgggcccaagagtgtggaacaatgccgcaagcttcctctacatcgaatacgactctacccatcctgactcggatccactggataacacacgtatccatcccgaggactacgacctggctcgcaaggtcgccgccgatgccttgggtctcgacgaagaggatgtcaaggccgagacggaccttaatggaccagccgctatcgttcgcaaactcttcaatgatgatgtccaagaaaaggtgaatgagctgatcctcgaggagtacgccgagcagttggagcgcgagtactcgcaacggaagcgcgccacgcttgaggctatcagggcagagctgcaagtgccgtttgaagagcttcgcaagaactttgtaactcttactggcgaccagatcttcaccatgttcaccggtgagacaagggagtcgctttgcgagggtatgattgtgccagtcaatgtccgcgttgtgaaggacgacttcgctatcgtcaagctcgactgcggcatcgaaggcagaattgaggctcatgaaacctcgcaccgccactccgtcaaggatgttttgagcgtgggccagacggttcaagccaagctcatcgacgtcaaccgcaaggacatgacctgcaagctcaccatgcgggaagaggagatgcgcagaccttatcgcaagaactatgatcacggccgggatcaatgggattatagactggaagatgccgaccgtgaggagctgcgcgagaaggacagggtgacgggacgcactcagagggtcatcaagcacccgcttttcaagcctttcaacagcacccaggccgaggaatatctcggcgggcaaccccccggagaggttgtcattcggccatcgtccaagggtaatgaccaccttaccatcacgtggaaggtggccgacggtgtccaccagcatattgacgtgctggagctccaaaaggacaatgagttctctgtgggcaaggtcctcaaggtcgggagcaagtacacatacaccgatctggacgagttgattgtcgaccacgtcaaggccatggcgaagaaggtcgatgagctgatgcagcatgagaagttccagaagggatcgcgtgccgatcttggtaagttcttcctcccaacatactgttctggccactgatggatcactaacacgtcaaaacagaaaaatggctcacaacatatatcgatgccaatccaactcgttccacctacgccttctgcatcgacaagaagcacccgggctatttccacctgtgcttcaaggcgtccaagaattccaaagtcaacggatgggtggtccgtgtcgtaccccatgcttacgagctgatgaagaacgcctacccggatatgagagctctcacgaacgggttcaagctccggtatcaaagcgagatgctgaagatgcagcagggtggcggtggaggagggggccagagacgctagtagtgtctacgtcgatggttctgtttttcgacgagtttggggttgttatcaattttatgtattctcacttgcctcttatcttttcaaggggcgagcaacaaaagaaaaatcatggatttcaggctggttttggtttggcatgcaaggcgggcggtgaattgaggaaagggggtcctaagcgaacgaaaaaccagaaagtagagtttagtagataaatgtttgatggggggagggcgcatataggggacagtgccatgaaattgtagtttgatagtgttgttaatgaaaagcagtcacctaatgcatatgttgttcgtggcctgaagggagatggcattggggctggaggccacatagctactacaaaggaacagttcgccgaagagatcaccttgtgtggcagtttcaccaagtctcaccaaagaagcgaagctctcatgttatggacagaataatgggtactgcaaggtagtcatacgcataatcactatcaaactaccaacttacacctttttcaaaagtagataggcctcttagtattctttttatgcctattagctatcttttaaggtatatcaatttttttgaggcctatcaactatcttttgaggcctattaacgatctttcgacgcatggttgaagacttatgcagcgctggtgattttgtccacagtgtggctctgaagcattaatcagaaccattgaatgcaaccctaacccctaaccattcatctgcaccatgggtacgtcaccgccaagacttttgaccacaagggttcacgtcgctttgaggacccctcttcagggagctccagctcaacagaaacggcacagctctggaccccccccattccttctctgtctctgtacacatctactacctcacatcagtcccgcattcatcaccgcatattctcaaaatgcctatcccagaacctgatctagctacccgagctcccgagagcgacgctgccgaagaccagcaagactctccagctctttctgccattgccgctccaactcctcctccggagcaaccacaactatgcgacaactgcgtatctgacagaccaactccagctggcagtggagcgccacaaggagagctcactactctcggcgggatagatgtacagcgtccttagaccctcacccctaccaaccggaactaactctgccctcctgccaggtctacataaccaaacccccatcctacccctccaccccagcccggctactcctcctcttaacaggcggcaccggtctcaagtcaaccaacaaccagctccaggccgacctcttctccatcgagggcaactacgtcgtcgtcatgccagatctcttctctggcgacccggcgccaaattcccaggtcaaggaagacgaccccgacatccaagccggtgatgggggaggcttcttagggatgtttaaactcaaggctgtggagacggccaagagcttcatgattgacatgtggcttgcgcgacacacagaagacaagatcctacccatcatccacaaggttctggacgcggcaaaggaggagtttgcggatgcggttgggaatggtgggggggtgtatgcggtggggtattgcatagggggacggtatgtcctgttgctggggcaacagagggagaaaaggggggaggatgtggagcagggggatgtcaaggagggaccgtggatcaaggcgggtgcggtggcgcatgcgacgatggtgtcgaggcaggattttgtggggttgaaggcgccggttagcttggtcaatgtggagagcgatcctatgtttcctgatgaggtgagggttgctggggaggatgagatgaggaaggggggggtggagcatgaggtgaaggtttatcctggggttccgcatggtgagatttctttcaatcaggggggtggtgaaagagagagttggctaacgtgatgataggttttgctgttgtgggggagtatgaggatgggaatatcaaggaggcgcagaagacggcgtatggacagatgttgaagtggttacaggatcattgatgggggaagggtgtggactgctggttaggatcgggcgtcgtgggcacttttttctctcgttttcgaaatacctatggaatgggcagagcaatggcatcatgcaggcaggttcagtgtttgggtggcttattgctcttgttgttagtgttattcgtcccaaattgacagctcaaacagaaccaaagtgtcactacttttcttcacaaaatgacatgtgaaagaatataattgctgttgtggacgtggaccggcgtagaatgattggcgtaggcgaacctcaagtaatagaatgggcgcggaagaacccccaagcacagccatgcacgtcccgaatttttaggaccagtcgccatctgctatgtactttcatttcccccccaaacaggttgcgatgaacagtataacatgaaaagcacatcaaattttgcttcgagccaagcctatggagatcatggcgtccctcgcccaggcaggctatggactcgaaaccgttgagggagagaattgtcatagtggtcaacgtcatctgtaaaggcaccacggggagccaaaagaggtaatcggccacggggcgggagcagacattgtaggcgccgcccggctcatatggtcacctttctggcggtgggtgttgtcaagtgagacaccaggcaaactgcggggcagagaagcgattcttcagtctgcccgggcaaggagttcgggcactgctagttgtcatgatataggactatcagatcggctttctaaacccttgccggctctgcagaagtagggtctatagcccggaaccccgtggggatatgatcgaggctctaacagcagttcgcaagataaaccaaactccaagttgtaggatctccatacaagcaactgacaccttcctgggagatttctcgcgttcttaatgttgcggaagtaacagggcagacaatgcggcttcggctgcttggtctggcttggggcgggagtgggaaaggggggggggggacgggagctggagagaggttgaacagcctggcgcgtaagccatatgcccagcatacacgttgaaacagcccaccattataagctctctagacgctggtttgtttcttgatcttcctttctcaagtacttccttttcccccctctctcttccaattttgacacatcatcacactcgtttcctgcccaacttttgcacctaacaccttcccaaatggacgttatcctgtacctagccggctttagaactcggaggcatcgaaggcagcagcctcattccgacgctcacagagcagattccatgcgccgtagacttccgaccaacaatcgcacagaaccggcgatacagcttgtggcgcctaacaatgaagaagccaatcatacaattgaagaagcacgcgatgtagatttgcccgatacacctaacgctggcgtacctgaggcgaacagcagcacatctctggagattaaactgaacgacctcatcgaactcgttacctcgctcaccgcctcaatcgtgaccaggcccgaaaacataggctttgcccattcatcaactggtttggttatcaacacctcgacgacggagcgagccattaatgagcatcagccaaccgatggtctcgttgaagcaaccgcggcacctcaacaagtcaacaacccaaacacccctggtcaaatcccgcccgtggctggccaaggctcgagtcttaaggaacagatggacagtcttgcggtcattgtcaccttcttggtcctcatgttagccgagagagcccaagcccccgtcccgcccgaggcacccgccgccggtcctgttgaagcctcagcacaggagaaaaccatgcctccatgcagtcaagaccgcaccgaaacagcccagacatcaccgcaagccgataaaactagcactgacagtgccagcacgagcaccaaaagcacgcagctgccgtacacgctcgacgagccccgaagagcatcaactgaaccgcctctccaagcgacaaaaatcaaactcccaatgtcagatcagcaccaacagagcaagaagaagcacaacaccgcatcggtttttattttgctcggcctcacagatttactggtctatttctcgtcggtcagggtcgttgtggaatgcctggtctttcccgtgatcctgtttgcgctttacctctgctttggcaagtccgcctgcttttgctcgtggacctggagaccgcgcattcggaaagaacaggtcaaggcggcttgggctcagttgaccggtggcggggttggcgtgggcctggagacaggcaatgaggaaagaaaagctcgaggcggttagtttggtctcagttgaacggcacttgagagcgactctagaacaggacgatagccccatcgggtatggaggtttcatcctgagtttgtttcggcattgcgggctaagagaaagtctggatttccttttcactgttggatgggggatagattgacatgttaatgatgttttatgacagcttggtgtggatagatatgatcatcgggatgggattccctcatttgtttcctttttcatcaaaacggtcaaaactgtaagttggacccaactcgtttcctgtttctcacacttttctggggagcaatcctcattcttatctctttttcccagacagaaaaggtggctccattgtttacagagcctagccaagtctgggatgacgtgtatatacttttcttccatcctatctatggagcttgggcggttggcggggggagggtacgtttttgtatcatatcaaccagacggcagcggccacgaagcgcgaagacgaaaaccgtttccgggttcgtggacgatagatgatgggaagatgtgatatggtctaaatgaaactaggggagctgggacaagataagaataggatggaagacaataatgatggttgtgccgactttgactatctttcaagacctcttaactatcttttaaggcttattaaatgttttttaacgtttaatagtcattattcgtaatatagttaaactctatgtaaatgggggcgggggcttggtcagataaacagggggctccgtaaaggttctctcttcacttaccccaaacgaaaccacaaagggaccagttgcttgactcttctggtattttgcacccaataacagcgaaattccaaattactcgcggaactcaagctccgcgacatcctggtatgtgtagcagctttagaattgtcttcttccaaaacccgctgataccaagaaccttcagtctctgctttgcctaaatggccccttcgcatgtgcccgacgatacctatcatgagggagcggtgcttgagattcaacgacatctaccaccggaaccatttggcattgtgggacgcattcactataaactcctggagaagagaagcgagtggaatgcgttctggtcgagtgccacctactggtgtcaaaaaagccgagtcgagcttgctttggctcatccccccatcacgacaaccgaagtcaagaatcctgaaagtcgcaagttcaccatcactcggatcattcagttcaatgagcatacggaaggtcaaacggtcttcgagggagtcatcatatcggcgaacggaaaacgcaacgaattgatcgctaaagtttacgatggcgcttattactctctggatgaacgcttcggcaactcttgtgacgccgcatgcccggatgtgatgacgaaagcggacctgcattattccattgagtcctcgcgcatatgaggaaatccgcactgctggctttgccgggtccgttgttcccgacttttacggggcatggacgatctcgctcgagtcggacaacggtgtagtacgctctgtccgcatgatttttctggagaagatacacggcgcttgcgcgatggaaaagatgatcacgcagacgactacgcaggaggcaccgcattcttccttcgacttaagtcggttcgctccgctaacccaagagtttcccaactcccagcaccacaataaataggaaccctagggtactttatttattggaacaacctggtcgaaccgctcacccgacttgacataaaagtctcagtgtgtgtgtgtgtgtgtgttgaggcgagcaaatggaaattcgagggcaagcaagcgttagtgaggttgaggtattggtgcaggagacgtatggtgaatatgaggagcttggggctggtgagtatggtatctcgtcccatccctgaggcggagatcaacatgcctatcgacccaatcttgtagtagataatctcgtttctagagggcatatcgatccaacgggtcctccaccttaccactggccataaattgatacagctccccataccattctaagccaaggtaggcttcccgatttgcaacagaggacgtaagtcctgtaagtagagattccaacggacctccaatcccatcaatatccttagctagcctttcccccaccgaactaaataaagtccctcctccaacagagcagagtttaaggctgtcctgctatgtggggttcaaactacatggccaggccttttactatgttacagggaaggtaagtaaatcggtagatagggaggggggccgctagtatgacaaatagggagctccgtaaagattctctcatgcttatgagattgtgcaaatgaccttccccatggtctcattcccctccaacacctcatgtcccttctgaatctcctcccaaggcaaaaccctatcaacaaacaccttcagctcacccttctcaaactttggaagatactcctgctccaacctatccctcagcttcccctgatactcctcatccctactcctcaacgtactcccctccaccctcaccctcttatacaacagcttcccaatattaaccctatccggcgtctgcatgccccccatcaaccccagcatcacaagcctcccatccctcgccaccacatccagattcttctcaaagtaactccccccaacaaaatcaacaataagatccacccccttcccacccgtagcctccaaaacccccttcacccaatcctcgctcttgtaattaaaccccttcgtcgcccccaacgtcccctcaatgaacttgatcttctcccccgtcccagccgtagcatatatctccttcgcccccgacactctcgacagctgtatccccgaaatcgacaccgagctcgccccagcatgccacagtatcgtcttcccctccgcaccccccagcacaaaatccaacgcttgaagcgcggtaatccacgtctctggtattccagccgcctgctcaaacgacaaccagttcggtttatgcaagagcatccgggtagagacagagatgtactccgcatacgccccaccataagccaaaccgaagacctcgtctcccttcttgaagtgctcgtgttcctggtttggctcgtctccaccgaaagagacgatcgtgccgctgaattctactcctagggtggacggtgcctggggagggagggggtagttcccttctctttggaggagatccatacggttgaggccaaaggccttgattctgacgagggcgtggcctgctgggggatgggggatgggggtggaggggttgatgaagagggctgaggcgggacctttgccgtttttgatgtctgcggttgaggttagtggttggttgagatgacgggggtggtgatggtgatggtgagggggacttaccgactgctttcatgagatcaggcattttgtcagaatttcaggctgagcgtttcgatgagtgactgaattggtgagtggcaggaaaataaaaaccgatataaaacacgctgttaatagacacataaacgccgttgattagaacggaagacgttgaaagcggcggcttataaatggtggggtttagacggatgacgttatgatatggcggggtatatccgaggaagacatctgtgatccggccccatccagcaaccaccaaccggccgggtgccgacattgtgcaacaggcaatcaacgtcgagggtaccggccggtctccgcacacgacgtctaccgacaggctgtccgggcacgacctgatggtctgggacttggcatattgcatgaaaggaatgtggtgcaacaacaagggaaagtcggacacaacagccatgtccggcaatgaaaggaacacttgtttcgttgaccattttgagaaaacaaagcagctagccaatacattcagaggccaaaggatgaaagcactcagaagccgtcgtccttgataatcagcgattcagcatcatccatgccgtctggcaaagacggtgtgagagccagagttgagcaaaactaaagttcaagatcaccaacacaatatactatgcttcgtgttgttgtttgtgtcacgctctcttcgctatgggcaccatatgcagcatcttgcatagtgggtaatagatggcggaaattacacacacctattggacctgcatctgccaacatgtccaagagtttgaagcggtaagcgtcaatacatccggcatcggactgcacattccagcgagggttttttttttttccttatcttctggacgcgtgtttgatagacatgatcaacaggtggtgacaggttgacaggaaagatgacgtcgtcccgaacatccggatcgggtcgccgtggcatcgcgggactcggccatcaacggcggatcatagggcctgggcaaacttggaacatgtgaagggagctccacagtcagtcgactggttgggccgggttccttcaggggggctggaagaaaaagttcctgttgttagcaaggagatgggcataacggggccggccttttaatgaagcttcaggcccccataaaacaatggggccaatcggctgggagggagtccagaacaaacacggcgttttccagaaatagccggcgcatttcctgaacgaccgggtcgaaccgtgataaaaaacgaagtgatgatttatcaatgcgagccaccaattgacaaatacgcaaagaggcagcaatacgagaccaccacagatgacatgtcgatatttagcgcccggttgacctgatttggccgatgctgggtggggtggtggtgatgcgatggaagcggtgaaaacctgggaagaacggcggttgatctgccggaacaaccatgccctgaattcaggcaggatctcgacgcgttagccagagtgcgtgatcttgccgagcaccgctatcgcgcgctaacatcatcattgttgtcactgatgagatgggatgggatggatgcagcatgcagcaaagtgcaggaaggaggtgtgggtggtggtagcggcccacctgcaaggtacgaaccaaacagtcgcctgtgtgccacctcatctgttcatttccgccgatagcaaaggtgctatttccaggcacgcccagaagccccgaaaacaccggcttgatatgtatcgcttcgttttgttcttgaagaagagctccagcatgttcctggtcgcaaacacgttcatggaatatggccatgagacgcgctgcgaagaggcgcggtgacgacgacttgcatcgacggcaagctgaagagaaacctctcattaaacggctgagagaggcccaggcgcaacaggaaattgggctgttgctggcacctgccacgatgtgccatccatttccgaagaggcaattgacagcctcccgttggccgccaccgcctggccaaggatccacactccccttttccaccctacccctgacaaaaccccctgctcggctgcttgatttgatccattttcggagacacgctatcacagcgagaggatcctggatccgctggttcgcctggctctcctggcaaccccaaggaaaaatcggctctctctgggggggcaggctgggtttccccgtccatttggcgagtatcgctatataactcgtgtccgctctccaaaatgatcccgtttcccttttctctcttcacccactcgctctctatcagccctgacttttaagtcaagtacattcgttcttcaacgacagcgccttcaccaccaactcaccatcctctccaacgtacatactttcgagtatataatttaatacccgacaaatcagtcaaaatgaagttctccactgccgtccttgccctcgccgccggcgccaacgccttcaagaacgtcacctacaccaccgaggtcgtcactgccatcaccacctactgccccgagcccaccactgtcgagtatggcggcaccacctacaccatcactgaggtacgatcttccaaagagagacgaccgggaaagaaccactggagctttgtttcagaactgggacgctttctggggaacaaccgagcttgatctcgatccaccggttctagaacatcaccgctaactcaacctcacaggccaccactctgaccatcaccgactgcccttgcactgtcaagaagcctgtcactaccatctcgtcagtgatctgccacgactggtgcgtccctaacatcgaattgggattcgccattcctgttgaacgtccaatgctaacattttctccagcgcccctgtttaccacaacagcaccgttgcccctggccccaccaccacccccgttggcaccatcggccagcccgcccccacccagcctcctctcgccactgctggtgccggcaaggctgctgccctttccggcggtgccctcgctggtgtcctcggcttcgttgcccttgccctctaagttttctgcctgtcatgaccacattttacccgctgcggctttcggggctttgagagctgtcaagctccggccctgggaagaccggctagtaatacttaatcaagtcttttcatgatctgggatggaacatttttttttaaaaaaggataccaatggcaatgatgtttcaagggaatacaaaggggaagttcgaggggatctaggatcccgggaaaaggatgatgggatgggatagagttggaataccctcatgatgtggttgtgcaagggaaacatttcgctcctgcggaggacggttgtcaccttgccaagttgtcgagtcatcatttttctggcgggtgttttgggagattggtttaccccctttccccgagcacagtcgaggtttcttgaagctcacagcatctttttggaaaagtgtttcggatcttacggaccaaaatatcaacgcttttcagcctcgcctcttctcttctcctgtgttattctttcctactttcaattgtgctctgcctgtacatgctttttctatcaagttgtaaatgtttgatgggcacaatgatgggtttctgccgggcgtgtttatggcttctgctttgagggagaggagggacacaataatatctttatttttcgtgggtcatgtacatagttgtgtatcttctctctattgctcaaagagctagttttggtccggtggcctatcctttgtacatttctctcggttcctctttttttttgttgcatctgtgacgggagttttatgagataccattgatacctgatgtttctactcgtattgacttgatcgattgactgaggttgaaacctggcgaaaagagagacacgggatcccggattgggagttcaactcgatgttgtttcaattgatattttgtgaacttcaaggcagggagaaagctggttatgcagggtgtcactgtatgcagcactgaatcatgattcgaatcgtgcatttttcggaaacccttcccgtgtttttttttttttttttttttttttttttttttttgtatttcccttttcccgcagttcccgcccccgtgttgctggaacctggatgctgggacgtgccgggtaaagacattgtgttggtgttccaggttcccaatatcgccttttcttgcccgccggatggcctcgggtgtgtcaacctttcaagacacaaagttctcaatggcggtgacagtgcaacgtttcatcaaccatgaggtaggtttcgctgagaattgccaacggagaaaagtcatcaatgaccaattcaagtccccggtcctgaaccaagcagttgcagtgtgaagtccgaatcctgtaatgccaccatgatcaacctccaccgttgaagctgtcggccgttgaccgctgctaccttgccacgattctgtcgttctcagaataggaatgatcatccctctttttattctagaatctcgatgcagtttattacatttcataaccataaccatatcgaaaggctttcgtctatctccatcatcatgttccttcctaataaaaatccctagaacagctcaccagggaaacaatctcactctcttcaaaagagccggcggcacagccatcacctcaccacatcacaacagcagaaaccaatgcaaacaattcccgcctgactctgcatgaattgatagcgtgagagaaaagacgagatgagcgttcttagcgcccagaccgtcacgaaccaagcagattacggatgatacggagtgaattacgagatgatgatagctgcacgccctaatcttagggggggtgtggaagaaggaatggtaagcgagatttgattgttctgtgctcacgcaccaggagaaagtccgggcacttggactgtgcaggtgaagagggaaaatggaaaaatgaaaataatgagagatgatggattggagagcaaaaggaaaggtttgcggtgcttcgtaagagagatacgatatgatgacaggaaggtcgttgataagacggaagaaaagcctcggttggttttatgcagtgcataaacttcacaccaaacacatcccaaaccactgactttggtgtaagacaattggctcttttccccgccgttatcagccgccaaacagttcaacgactctcttaaacatgaagaaaagatcgcccccccaaaacggcagccatgatgattcggcggcgttgaacaaattgccaatgatcatcgggtgagccactcgaagcacatgttttttaaagttcagaccgtcggccagtggccagccaagatttccttccccatggggaacaacggtcgagagcgggtatcaaaacgcggggaagcggagtcttgacttacacgatcctcatatcattcacgatcgaacaacaaagcaaccagttccatctttccgtgagatccaaggcactcggtattgtcgagaaagttatctggtgattttagcaatgccatgtagttaggttgggtagcaccagcttagagaggggacagggcgaccaatggttcgtcgcctttagttggggtccattgattgccccgcgcggccgatccccttccccgggaggaagggcacgatagaactgcatggcaccttcattgttcgggagtcggggcaacggattatatgcgggggagaacgtgcagcaccgcgggttacaactctcttaccttcaccaccagcttttagatatagagttcttccatcatatattcatatcatcatatgtttcaacatacttttacatctttattgtaccactacttgtacttgtgctcctccgatatttggtatcttgttcctgtcacctgtgacatcatctcatcacaccgccgacctcactcgcctcgctccatctcagtatcaagacaacaaaaatgaccaaagaccacccccaaaaccacacccaaacacactccctcacctcccccgaaaccttctggtctcaccaagccgatcaacttcattggcacaagaaacccgccaccgtcctccaaaagacaaccaaacaactcccttctggtatctctcacgaccactgggcctggttccctgacggcgagatctccacatgctacaactgcatcgatcgtcacgtccttgctggcaggggggatgctcctgccatcttgtatgacagcccggtcacgaacaagaaggagacatacacctatgccaggttactcgacgaggtggagatctttgcgggtgtgctgagagaggagggggtgaagaagggggatgtggtgcttgtttatagtaagtatccaattctctctttcgaggacaggattgatactgacaaagactgaagtgcccatgatacctgctgccctgatcggaattctagctatcaatcgtcttggtgcgatccatgccgttgtgtttggcggttttgcttctggggcactggcccaaagaattgaggcttcgaagccggttgctatcctgactgcttcttgcgggatagaggggaataaggggccgattgggtaccagggttttgtggaggacgcgatgaagatttcgagttggaggccgccaaagactattatttggtaagtctcaagtcggactctagcatttcacagctgacaataacacaggcaaagagacgagctgccatggcgacccattgatagagcgaatggccaacgaaaatggcaggccctggtcaagagctgccgtgctagaggttggcgagcggcgtgtgttcctgtcaagtcgacagatggcgtctacatcatctacaccagtggcacgacgggtctgccaaagggtgtgctgagagaagctggcggccatgccgtcggtctgcacctgatgatctcgtatctctttggtgtccatggtcctggtgatgtggtaagtactctgtgtctttgacatccttcatgacttactgacacgcatcagatgggatgctacagcgatattggctgggtcgtctctcacagctatactttatacggccccctcttgaccggcgctgcaaccgtcttatatgagggcaagccagtcggcacccctgatgcctcggccttctggcgtctggccgaagagtacaagatcaacaccatgttcactgcccccaccgccctccgcgcaatccgcaaagaagatccggataacatccatttctctcgtgttggtgagcgcggaggtctcaagaaccttcgagcactattcctggccggcgaaagatcagaaccattcatcatcaccatgtatcaggacctgctagccaaacatgctgcacctggcgcactggtgatcgacaactggtggtcatccgaatccggctcccccatctcgggcatcgctctcgtgccccatgcaggtcatgacagagccaaccccacctcctctgcctcacacccaccgctgaagataaaacctggttcggcaggcaaagctatgcctggatttgatgtccgcgtcgtgtctgactctggtgaacctctaccaccaaacaccatgggcaatattgtcctaggcctcccacttgcccctactgccttcaggactctgtggggagatgaggaaaggttctacaagggttacctcaaacgcttcgacgggaagtacatagacaccggtgacgcaggtgtcattgatgaggatggctacatccatatcatggcacgctcagacgacatcatcaatgtggctgctcatcggttgtccactggccaactggagcaagctatcaccacccaccctgacgtcacggaagcatgtgtggttggcatccctgacgcactgaaggggcagatgccgtttgctttcatcagcacttcccacggagcggcaactacaaaagagaagaaggagaaactgtttcaggagatacagatcctggtcaggaagcaagtgggtgctattgcgagtttgggggggatgattgagggtaaggggatgattcccaagacgaggtcagggaagacgctgaggagggtgttgaaggagttgttggagaatgcggtgcatggggaggtggacaaggagttgaatgttcccagtacggtggaggatatgggggttgtggaggtggcgagggggaaggtgagggagtactttgcggagttggagaggaagggggagaggcatgcgagcattgaggggagggagaaggcgaagctttaggggagtatcttgcggtgatgatcggtgtgatgatgagagtggggagtgatgttatgataattaccacgaggcatgttaggcactttgtcgcaaatatagtggagttccaagctgtgagggccacggtccttggtcgtcatccactgactttccttcttcatcaatctgctagtaagccacctccaccagcgcaattacaagacgttaaggcagagccctaattaacttcatccggacagctcgcaaatcaaagttataatttaatttactcaatcttttatatcctcaacatcacgggttcagaaataccctattttcatcaagggacaggaataccgcggccgcgcatatctgaccataccttcagtaagggagcggtacttaagatccatcgacatctaccaccgggaccgtttggtatggtgaacaatgttggctacaaacttccggagaagagacgcgtgtgaagggcgaggataaaaaaggtcatgatgcagtgagcgagagctaggaatgtaggacttgatattgcctttgtatcagtgcactatctcaacttttaaggggcatgacgggatgttataaatacaatattgcacactataatgtagaatgtaaggtcttgaaagatagtaataactcctctcggctatcttgaaatgccttttgactattttgaagtgtctcttgactatatttgtagggatagtagctatttttggaggcctatagaccatctttgatggtctatagagtatctttgaaggcccatggattgccttttagggcctgtcaggggctgtcgtcaaagatggtaatcaccattcttttatcatcaacgcctaccttaataacccttacgtctctcactttaggtatgtggccactggtaaggttaacatcacacggctacaccaggggccagccataccccttctctggagggggtttcaccaaagtcacactcccagtcattcctcgccgtttcttttcaaccaccggcaggcaacctacctcactgcctacaagtcaaccgtcaccagtcaaaggctaaccaccagtcaagcaggtaagcaacaaagctgtgcaccagattttgcctttcatctcgatattgtcagctcacacacacacacacacacacaaacacacaagatcttggcacacttccagcgacagtagccaccacagtccctcatccggacgacggacaaaacagcagcagtagcacgcttgtgactttggggcgaggtagcatttttgcacttctttttcggcccggatctgcgttgtgctacacccagcgtctagatctcggaagcccccagtgtgtatgtgtgcgcgtgtgttcatgtctacgattcgcgcgcgtcattgatgcgggtgggtggtatgtcaatcttgaagagaatcatgatctgacttgttattttagagagaaaaaatatcaacaatagtttgagggaaaatggttgggcatcaagatacgccgcgggaagccgcgtctttctccccgggctgttccctgcagacaagacaggagggaagagaatcaaaacttgaagtgtgtgtgtgtgtgtgtgtgtgttcaagtccacggcgtcgacctatctcaccacgctagtcttgctcaacaagctgctaatgcatgatctacctgaccacgcatacacacaggaaactgcgcagtggtgttcccggtggcggcagtggagggtgtgtatgtgtgtgtgtgtgtgagagagagagagaggtgtctagtacggtggtatgacagccagaccaccagatgggagttacaccaaagggacggatcatgtccgggaatggggggcggggagtctggactcgagaagcaaagcaaaacacctctctgcttttttctcagctaattctcttttgtctctttttttttcaccaagtcttgtcatggtagtagctgagagctgtctagtacacacacacccctattcctacccctatgatctcttccacctgcccccgcccaaagagaaaattggccacccggacacccgactcgatattaaactcgtctttttaccgccccgaaaccacgtaagatccacccccttttcctcctccaatccccccatcacgaggcttggcgccgctggtggaagggaagaaagtgacgagttcgttttgtacgacacggggcaaagaacctggcgatgatggaccgataatataccaatccttctgtagcaccaaacccttacctcagcaaaaagaacttcattggaagagatcgatcctgcggaagggaggggagggtggggggggaggcaaagaaacactggtttggtcaaacaggaaagaaagagatacacagaagtgacggacgggtatacggtggtggtaaaaagaagctaggaaatcgagtgagacattccacactactccgtatacacagtgacacacggtaagaagaaaagaggaaagaaaaaggtggcttgtgatgagacagcccgttgttccgttttctccgacgatttcttcttctgggggcttttctgatggtgataaaacggacacaaggcgctgtccgacagatggatttgcttcggtgttcttttccttccatcgtgtgccctttgtgtgcgagatctgagaataaaaagaacgggacatcgggacacagaggtgacgtgagagacaggctggttatggagatagccggtgtactaaatagacatttccgtggccttggatcgagagctgttcaacaaggccactttttaagttgaaaatgcaaaaactgccaaaagcaatgctgtcaatagtaagtattttcaacaactaaaccgccccataaccacacacatcccacccagccagcacctgatatccttcttgacccagcatccatcctctccatatcgccatccaagtcatgcgtcacacatacacacacacactcacacacacacacacaaaaaaaaacccacaaacacacgccccaaaaatatgccccttcccccgaatgacgaccactgttgttggcgcctcactccctttccgcctcgtcccaccacaacttaatatatccacggcgaacatgtccctccccaattcctacactttccccaacccaaagtctagctagcgcgtgagtggcagcgcaaaagcaaaacaagcgcgcccgcgcgccaccccaccggcccttctcgacggggctcgcaacgggtaactgcaccctcacagcacagagagagaaaagagctggccaccggtggggtggtgagctaagaaatctgcatgtttccgttgggtagacacagtagtctgggggaggagccaagtactgtgctcttggagttgccacttcacatcttcagccagccgaccgtcattcggggttccccagcccttccttttaggattccgtcggctcggggctgtatgggtcgtcgttccagaaggaaagcagctatttccaacccctccccccatctcaaggtataccacattttacagtagacaagagggttgcgtttactgtgtacttgtttgtgctgctgctgtctttgcaaagagcccaccccaagacccgccctgtcgttcattgactgtgctctctacaaatctcccctctggctggcgctttcctgccttgatgctttccatgacccagtcaacgctgacgaatttgacgcctcggcctcggatggtcttgatctctttttgtagcttttgagcagcgagtccaccgccggcaaagctggatttccccaagatgacatgtgtgacttgtttctttgctaggtggagagcgacgctcgcgccgttggtggcaaggaggtgcttgagcatgtggtctgagatggctgggtaagtggagccgttgatgtagatgacgaggttgtcgaagatacccttttcaggggaggctggtgcggatggtgacttggtaggggagtctcgtgattggggtttgacggtgggtggtgataagtttgcgggtgggtggtatattgctgtggaggatgacttgctgttgcgagtagcctttggcgaggcaaagaagcgaggctttccggtaggtcttgggtcctcttcgactacttcctcctcgtcatcgagctctggaagtgtaaagaatctcgacgtatgtgaggtttcccgttcttcttgctctaatcgagcaatcgcagctctttcttctggagttaatccaacctcttcattttcgtgatcgttcccttctgtggtgggtattggcctttgcttcaagagtagcagttgagcttcttgctcctctgcttccatcctcgcaaaaatctctctttcttccgctgttagcccatcctcaccctcctcatgttgttgtggtggtactgatgccggtggctttgctggtattggcggcttcttctccctcatttcatgttcctcctccgctttccgctttttatttggattcctcaacatttccagcacactcttcctttcccctgtcgccagttccctcacctcctttggtatgtataaccccagcttctcatcatactcgttcgacccgcagcccactgtgtcactcataaactcatcacctccgccgttcccccccttgaactggtagttcatctttttgaaccgtgacaccctccatccttgcggaccgcgcgtttcggcacgctggtggcctgtcgatgatgagttccaagggtcgaagcgctggagattcggttctgttgggccttttggttttgccgggggtgccagtggtatctttcgtggtcgtcctcgaggcataatttattgctttttcctgccttccttgtttggatttgccgggggtagtgattggtcaacctggttgaagcaaacggatgggtgctgatgatgttaattttgatgcaaagaagcagttattatttgccatgtgaggtagtgataaaataacgtgcgaaaataagcaagtaggcagaaatgaagaagccaacaaagacaactctgaaacacacagaacacgctctctgcgcgcaagtcgcgtcggtcggcacctagcaacaccaactcgagctccattatcgcaggtctgcggcacgaaatcacgtgatacccctccacaaatctgctcttagcattcattctcagcctctccaatgtcatccatcggggagtttgcgcctttttccactgaccacccatcgatgtctagactggcgtgatgataacagtgtaacatcccctattccccgagcgaagctcccctaaatagcctagcaattaacctacctgtcacacccaacagagtcacatcaggcatactcgcctctgtctttcacagtgaaaacactccacacttcggtttcggtctctttgctcatcgccatcagagagccattctttcacctttcaggaactggttcctaaagggcagtgcgctctacccatctatctggaacatctccatggtagcgatctgtcacccccctttttaccctcaagcgatccgagctgaagtccttcttctctcctctccacgaaatctaattccatcattcggtttagctaaactccctagcgaatttctgcaagggagatcttatcaccctcctctgctgcataagacatgtttcccgtgcgccatgttcttcaaagttctaggttaccttgactcaaaactcaggtagcgaagtgtgatatgtgatatcccccttatttaccccctattatacccaggattatatcccgtcccagcagcccgtccccccacgaggacgcggggttctgtttctcccttgaatgcattttggttcaagtttccaaaacggcagggtttgttgtttagtctggttcattattcttgaacactaaatacacctgtcatatatgtgatgttaaacacacccatggcatgaatgatctccatattatcccattgttaatagcacacatttgtacgggtgtggggaatggatcgttccgatgcgcattgcatatctgcagtggcggttgtgcatatttcatgccgtcttgcttccttccctcgtccctgtccgtatcgctgggagccgcccaagagcaaacaccagagcacagtaagaaatactgccagaaagaccccctttttggtttcgtttttctgcagcatgggccccttattgatctcttcaccgttgatgttgcttcctccgccgttgaaaccatgcacgatggtcattgcggcagtaatggtgatggtgacatttaacagtcacagtccatctgtctatgccatgctactgtccccatgcaaacgtgagtacggtagatgaactgtaggtatgctcgaagcatcccgtcatgtaatgtaatcctcctgcctctgcctttggcctccctaccgtacctacatgtaggcacccacaaactgcgccgaggaaacagtaagcaatatcaacaacagccggacatcatgcaccttccggtactcgatattttcttacgcgcacaacctcaccaccacattacattaccttcacctatccaaattctaccttgccctcacagcagttcatgcacaacggatgctgcaaactgtgaccaccgctctgcaagtacatacctcctactccatgtatgtaacggcgacggacaggaacggacggatggacccgaagtattctgcaactccagctccagcttgatgcaatgccactgtcctgaacctccctacctaaacttcgtctcccataaccccaagaaatccaagtatcatcatcatgtttgacgcttaagcccatgtttggcggcatataatcagttttgaaggaatgtgatataagcccccccatcacacaatgcatttctcatatcctaccttacccttcctatattcccaccatcaatggaaaccaagccactcactcccatcgatcaatcctgcacgccatcccccccagatccagccagatcttgtgtcatacccacctaccagcatcatatttcatgcgcttgtcgttgatccctccccagccggccgttcacacagacccattcatatgtctccaggtcacgggccagcaacaaacaatatttgttttttgtatcaagatctacaattgtgatctggagatctttagtgccccattattgtgtgccctgaaaacatggtcatggtggttgcttgaacatcggtgtttccactcccgaaatcccccacattctggccatcatcggcggctactcttctcacaaaccatgctctgttgctcatgaggactcagcagccagctaggttggacctcgttggctccctcccccccgggtgctcaactgctatcagtccgtgccgctgcccatcagccaacccaccaccacctccatgccatctcaaccctcagcgccgccgctctaaccgtcacacaagttctttaattctttccaacagaagaaccagattacattcaaaccccccattttgctgcttcaaacaaactcagcccccaaccaaaaaaaaccaaccagggaggtgaataaatgtctgtgatctaaacccagcaacccacccaccaaagtgtcctttgtgtaaccgctccttaatatcaactttccccaacagggggcatagaacaaaaaaaaaacaaaaaagggcaaaagcggtgtgtgcgtgctgctcctgatgaataatgaaacccataatattgtctttttgagaaaaacataactacctaatcaccaacaaaccatgaaacaaatattattccccacccccccaaaaaaagccagcagtattctcaaaccgcaaaaaagaggctcagcaattgctgtcccttctcaatatcactgttacggatacccttacctacctacctgccttacctgcccaaaaaatatgcgtatcatactgacttgcatccatcattatacctaccgtgcttgcgccgatgccgggtgggtgcatacagaccagacactcatgcaccacacaccatgctcagtcagcctgtcagttgtggtgtctctctctctctctctctcgctcgccgatctcctctttgttctgtcctgctaagtcagtcagtcaaccagtcagtcagtagtcagccattcacttcccccctcccttctccctccccatcaaatcggccattttctcaccatcccccattgataccaattcacaaccccccccccgcccgcgtccatttattacccaaatgcaagacccccctttcccatccatccatccattcttaggtagcaattcttcgcgcgatcgcggagacaaaagatctcgtacatacatacatacatacataacgcagcagtacacatactcactctacatttgcttgcttgctgcatgtcgggaatgcgagcgagacccccccccaaacacacagatccagagcaaagcaaaaaggcacaacgaggggaaaaaaagccaccccctccccccgtccagggttcccttcatgcaaattgtggtccagccagccagccagccagcaaagagaagagcacaataccgcaccttgatccgatggggcagaatcggggctgcctctgctgcttcatcagagcagtgggtggtttggttggttggctgggttgggtcgcaactcatagtactcagtgtccgtcctgaccgatgaattgcaattaagaaaagacaaacccggctccgagtcaaactttcccacctagttacagactcatgtctcttatttttcgctttcagaatcatggtccgctgccgcatcttgtcttgtctcggcgagaggcaaaagccaacccgatcccatggccctatctctgtatatgcttgcccccatgtcgtagcagtggtggtgcgaggggggaaggggggagggggtgagctgtaatatgcaacaaagccaggctaatgtgggacagcgcatcgggagagagacagatcttccatacagcatacagagaaaaaaaaaagccttgaggctaacttcctgcagtgttcccgtcgtcacccatgctgacatggtgcagccggcagcagcgaacaacaccctctcaagctaggccacgacgacgaaagagaggggcgatagagccgcccgcgagaaaaaaatcactagacggatagatcctagcggtagagctccgctcgtgaacggtttggtttgggtggcctaccaccggtcagtgagtactgattgtctgggagccaatatggcagcggggattttgacaacactttactaccctctgaaagcctcgaaaaagatctgatctcgctcggttatgggctgtcggtagaagaaggaccgaccagggcaggcaccggaggcatcagcaaagaagaggcgggagcggggaagcatggagaatgccgaggacaacaagaggtgcagtgacggcacaaccgagttcagttgcgaatcgcttccattgtctgaaatgcttttgagctgtcagccatgaagccttgggagagtcggtccaaagacggctgggcgtccttcgttcagaagagtcgatgtaccaccgaagaagacaatgactgtggagcaatgaggagagttgaagacgggctttctggcgttctctcattggcttcctggcgccaacgacttggccatgtctcttttcatcctggcctggggggttgccgatgtgtttatcgagcgcgacttttcgcgaaccggggaagacgacgtcaaaagaggggttggtgtagtgagggcgaagtagcggtgtgagccggttggagggacacagtgtgagacagcaggtcgggggatgtacccgttgacagaagagagcaacaacatcgagaatgtcttcctgttctcctggaagctgtgcagtgcttccagaacatgtcatcaccacaaccgccctcctaaccgtgcatatgtttgcaacaactccatgtggacctggcggacaagcactgcacttggtgcagatccagagacgggtatatgggccagcaagatggtccaaatttgggatacagatatcggacccgtcacaagcggcgtgtcaagacggctaaaaaccagcttggaagaggaaaccctcctatcgagccctgccgaaccagacttgccattgggtagcagcccagcatccggggcgagagcctcgacttgttgagtcgttgagacgatgctatgatggagaatgatcatggtttggtggtcagcaacaggagatgtcgagtttgtttggtgggttcgggaatgagaattcaatcgcactgtgaaggtccggacgttctctgcttctcttcgtcccctcacaccacatcaagaccaccctctcgcatgtgccacacacacggcacgcacgcagactgtccaccgcttccatcctggcagccatgtaaggcggaaaacggtccgcacatgcagcttgttttctggcgaataggagcagcaaagcgaggcaagaacagagttcaactgccctatgatttgcatgatccgatgtcccgcccgaacaatcccagtcaggaagaatgtcttggtcgagactcgagaaatgaagagggagttgcttcaaatgtgaatatgagagacgacaaggtcttggacgaatgtggaaagccaattggaggtttgacggcaagctgaccttgagcccaactccctcccacaaacaaaccaagcccccggactggacaggagctgctgggatgcctctccaaagtatctcgttgtgggtgtgggcttgaagacgtggttcgcgttgattggactgatgggctggccagccagtaccacatcccaccaaaggttggcgcgggaagataaagcccaaacccgaacgaacatgctgggaaagaggagggttcgtctatcaggtatcaaccttcactatcgcgacgccctcatcattattgccagcttcccagtcgagtcgttattgcgcaatcaggagtttggtgcttcggtcccgggtggacttgtgaggaatcggttggcttgtcggtcatgggaataagcaatcgctgtcatgagcttgcttgcactgccgtcatcatacctatatcatgatgtattcacaatgctttgtgggttgcgggaacgctagcggatacgtaacaagaagcctgtccgtgaagcttcagatctctgtcgatggctggccgggtgcccggacgtgctgaggtccggctttgcaggggaagcttcgggacggtccacactcggaggcatcggtgcagggctagcaagaaggggctggttcttttgcgtcgtcaagggttgagactgatgatgagggttggaagcgatcccctgcaagaagaggaaactgaaacatgaccacacgccccccctattcgattcgagcagaccgcagcagcatgattggaggatccatcctccatcgacgcacaagcacctaaccgctgtgcatttgtccgcatgcaagtgttgtcgagcccttggaagttttcctatccaagatccctgtgcgccgaggctctggattctcgctgaccttcttgggttggacgttgtgcgtagcctggcgatgcagggacctcatctgcctttggcgaagaaaacagaaacccatggccatcactcccgctcccccccaaaaggacgtgatcagagcgccgctgtggtttcaggcctaatttgggagagacaaaagaaacacccaagacatctggtggctttgaccgttttgctcaagggaaacaagcccccagaggacgggactcataccggtagaaggccctttggcagagtgatatcaaacaagaatggcttttgcggcacggctaggataacgcttagtacttcggacgaatacctcctccatatcagtaactttccacgccgtgaacactacaccgttacttcttggtggaccttcggatggttgggggtttctctggatggaatgcacaggatgttgcataacatgagaaccagggaatgtatgaggctgaatgtgctgcatctggcacccgccagcacacgagcatcgcagttgcatctccgaagtgagagtattgtgaccggtcagctggctttgggagttggcggtcgacaggtttgctgccggcttacgccactgccatctcgacaagaatgtttgctgctgcgccggtcgcaacacaggcaggcactcgacaggaccggcagttgacgagaacacagcatgaaaaatgcggttgttctgctttctccccagggcctgccgccgggtcatgcaccgcaccgcatgaagtttccagaaatccggccaggcggtatcggcaagtgacctgtcatcgcgacatgctcccgccaaccgttgacggcttggaagaggtttgacaagatggcgaatatcgagcaagaaaatgccatgataatggcctctttttttagcatcaagttcaacagacaagaaacagaactccacttccagtcacccgtccagggtgacttgatggtctcgggtggaacatgagcgggagcgagatggacggggtttttttggtgagggtgcggtccgctcgggatgtcgtcccagtgggcgccggttctacccacacggggctcatcgggacctctcagcgtcaagtgacctcggttacagccagtcctcgagagccacgattacagacgaagatgctgagttgtgacagaacatagcgaggcatgccacgtacgcacaccaacaagtgtgcttttcttctccttacaggtatcggagtcgacggcgatgtcttgtgatggaggtcggcatgaagaaaaatctcctctgttgccaagtccacatcgccgagccggccagttcgatctttctggaccgtgatcgaaaagagtagttggctcgccgttgcaatccgcaaaaaaagagcgcccagccacttccgggggggggggggggtgtcaatctgggggagactaccaagcgagatgctgttctggcgataatcatgatgatgatgatgatgatgatgatgatgaagatgaccaaattcgatattcctaggcccatggcatcagcaactcggggccgaggtccttgacgtcgaaacatgtcatgacaggagcggtcgtgcattgcagggcagggcttttgcggtgatcttgcattggtggccatcaacccggcagcacatcgatggacgcgcatctgaatctccatctctgaagatggtccatcgctcaccacaggcacaggcaaattccctcgcttctccactgcaacgactggatgctcccacacaagcttctgcaccgacaagaagcatggggaggggcgtgctgttgaacggacagtgtcgacatcatgcggtgcgcaccgtatacctcattaccccgctcttcggcgaagaatcacttcacccagcattctgtctccatctcgtgtctctctctgcacgtggttttgtttccgcggttgttgtgtccagagttgggtgtgatcattgtgcgattgaagatttgttcaagtgtatgtcggtccagtggtaatgatagaaacaagggtttgatgttgaggtcgttagagtgagctcgaggttggaacagatggtgagtggctcaagcttgcagatggcccgtgctgtgctgtaagaaagtgcggcactcgccgagcccgagatcatcgcagccacttcgtcaacctccaaccaccaaccaagcagcagtctccaatcctctttccgccgccattgttttcgtattcttttttttttctttctcccccccccccctcttttcttgtttctcccgcgaagtgccgtctcaaggctgaaattgtctctctctgagccttatgagccttatgcatcgccgttatgtcaagtgcttcctgtcgatctgttagtttcgaacgtttggatatgcagtattcgagccgggcaggcactgcatggatccgtcaggccagtcttctattaccatccccacgtgttggggggacgcacgacagcccagcggtggcctggtcagcgggttgcgcgcagttgatcttgttgacatcacagcgtggtcacaatgaagcgtttctttgctgttcctgaagccagtgcctcagatcagatgcagcaagctacacggcgtgctcgtggttcggaaaaagcttatgggatctgggaatgcctgagatccaatgcatgctccaaggccaggccctccacgccagaaggtgcagaaaacgcaacgccggtgttcgggttcatgtgcgtaacacgacgcttgttgcccaccgcaccgcactttgcagcaaatcgtgcattgcagctaaatggtcaatcggagtttttctcgactgatgcggatatcgactgatgaaccatacaggccgaaaagacgtctcgggatcgggcggactctgagttccctcatctcatcaattgatttttgaccggttcttgattgctcgtggtcgccgaaggtggtctcgtcgaccttgcttgcaacctcgccattcttgatatagcggtacggtggtctggtgtggttaccttatctctgacacttttgcagaagatcggcaatcaagaaccggtcaaacgatatgtcaagccaaacgcagcgaaaagacgggagggcctctcacttacacactacccaccacgccgtacatgtgcattgcatacggtatgtatgtagatgcacctaccaccctgagtgagcggcgcgttgcatgcattggttgccgcttcgactaacgcaccagcatcttttgatctgttttttttcttctcttttcttaacccaccaaatccccgtatggatggatgggtatactatgcgaagcacgaagggcctgagcccacgggtccctccctgacagcaaagacaccacaagaacaactcccactgtgtcttccacccaagtcatcagatcatgagccaagaatatcagccagcaatttgccattcgcctatcgttggttttgaagtccacgaagacgacgaaagagcatccctttctggactagcctctcaccggccaatcagccaggacatggctggtacctaccctgcatgagaggggcttggtggcggggagggagggggtggctgcagcgaaacacctgctttgctttttgcacagtgcgggggttcagcattttcaactgcttccaaatgaagaacgcctccccagcagttccgatacaataaaagatgtgatatgacccggtagtcgcgatatcgggatgtcatatctctaatctgggccgagggatgcaaaaggagaaggggaggcagaacatatcggacttttgggcggcggtaccgagccggcccctccgtacccgcggggcgtcttctgtcacagctgaatcggcttggttcccggccctgcgcttttctgggtaactgcagcagtgtcgaaaaataacatcattggtgtttgctctgccagtcttccatgcttggctatggaagcgtgatggaacaagttgatggtgggagatagcgtggtgatcggcccaagaggagacggggcgggttcgacgggttcccccgtgtctctcgctgctctcttgcgagacccgaagacaaggctggggagggggcctcggggaaccactgcacaccaccgcacaccaccgcacaccaccgctttcttgaactggcgcgcggatatcaccagatgacaagtcggagcagtctcatcggctgattcgtgaagaaagcgcccatcacagaaacgtggctcactgacgagtattggccggcggctgttttcgagagcctctctacccacacacaccagcaggtccttcccgccgtattctccgagtgtccgttgagcctaatgtttagctcttctcacttgccactcaaacggtctatgaaatggtgattattttcgtggcttgtctgatgaatgatccgttttgggatgccattttacctaccctcgatgatttgcgctacgccacagccaggacgccttctgattagccagtgccagaggtcttgatggactttccggggggggggggggggggggcaaagtaacacggtatatagaacacattccaaccacccgtatccaactcacacatttaatctattcgtacacgtccggaggccgagcggcagcatgtcagcatcaccacccgctcataagttcgcagctgactgtttccatggacaaatggattcggactgaacaacatgatgtggggccaggcatggctggtactagaagaagctgcccatagccacatggctcaacattcttgcatctacactacaggagtctgccagcgtataatagagacaagtctattggctaagaaatctctttacactacagctcccgctctgagaaagaacccgggaggaaatgcgttattccccggccaattcttgcagaaaaggtgccggcgcttagaggacggcaaagcttccatgttgggaaccgttcttatcagcttatctgataggtatctatatacccaccagttcgggcaccagagccttagtccaagcaatctgcttgtaagtccggtggcatgctcacaacgttcgactagtagatatcactctacctacctgcttgtccgaacaggagaggcaatggcttgaggtgatagcgtgggctgtgagcatcatccccccaggctgctgctcatcatcagttgttcgttttgttgcgcaccccactctctcttggacgggaggagagtgttttctcacccccgccccctcttctctgtttttttctccccactggtagctcgtagccagtgcgacgttgaagtctcgactggacggactgcccacacgcctccctgggtgagggctgctgttccaccgcgggccactaaacacggccgcttacgcacacgccccatgatcccggtcgcggcccacatcccaacctcccgtctccagtcagattcgctcagaagttgttttccctggtcgagccaggcccggacaacaaaccacaccctaacctcctctagcttagccccatccccatccccatttgccttccccattgccttcccctctctccctcatcactctcgtctctcgtgtcttcagcagttggtggaaatcaatatcaatggagagtagtgagtgatggaggatagagaagtagaaagacatttagctgaaggatggcgtagtaaacaacagagttctcgtaacgggtagcctggaaagaaaacgagaagctaacaccgttggcccctgctcgcttgtgtgctcggcggaggacacttgctgctaccctggtttgctgcccttgctccttgcacacttgctggggccctttcgcgaaggcccctgccagcaccacccggcaccaccacccagcatttggtttttggtgctctgctccaggccttgctcgccttttcgccctttttttctgccaatctaagacctttccggtactgtctttgggccatacccctcttgagtggtcggctggcgagcgagcggaccagggcaacaccggtacgtacagctcagagagagcggaacgggacaccgggccaggctggacgagagagagaagagagctcagttgttttctctgctgggggggggggggagacaccccggcaagcccacagagagctgatcgtcctctcaccaccaccacctaaatcaggccgcatcccttcctcctccttctcttccctcctcctcaccaccgctccaccgacctcccccaatttttttttctctcttttggcttttgaaagaggcaggaacgtctgagaggcgaggaacaggtacgatccgatccgcacacgcacagtttttctcttatccacgcccacgcccatgcccatgcccacggccccgtcccccgccccaatttgtctcgcttttttttttttttttttttttactgcttgcttgctggccgtcctgaaaaattctccatctctttttctttgctctgcctctttgctttgctctctcatctgcgtcttgctgccttggtcatcccaacttttttttggttgtgcgcctgccgattttggagctaaccgaacctgcatgagcagttgcgctgagtcccgacaccccgagttgcttgccggtttaactggagggtcgagctacgaacagagcgcaaaaacgttgtcgagagggccaaaagaacgcaatcagggacacccaaagcttatcccaaccccaaccgcgtgtctttatcgttgagttcaaacgttggtcgagatcacctgcaattctcatctaccgctgttacttctgcatcccacctgctggtaccaccgcctgcataaagtatcttcgaccgcccctcgccaccaaagcattggacagccagccaagcccgacatcacagagatccgctttcttcctccatctgaagctcaacttcctcgacgactgcctcgcgtccgctcacgaacacgtccttcgtcttgttcagtgatctggtcttgttgtcaaatccaaccaacagctaccgcgtccagcattttgctatgctggtttgatcgtgatcgcggattcccatatcgcaaccacgcacccgagaagaaaaaaaaggttcgacctataccaacgttcctggcgcctaccgagactagtactcgacgcgccgtctcttttggaggagcccgagaaagtcaattggaactaaccattgtctcagctacccaattgggccgctctagagagcttgtcgtgccatcaagcctgactgtctcgtcttgtccccctcctcggcccgacagtagtctccatcgtggagactggcggttacgtgaccgcaaactcagattcacccagcttcgagaaataccgaaaagctggatctcccgtcgatctcacaagggcatacccggggtccgtccaccgaagtgccgtattatcatcagcagcgaccgttgtatgtgaacgagagactgccatctttacctttgccgcagcctccccaggcatattcctcgagcggttcgtcaccccgggtaagctcaatatcatctgctgcaagctcccaccttggttcgcagtcgtccttcacctcagctgcgtcctccaacggccccaagaccccaggcacgctttccccaacgcttccgggtaactctgtaccaggcccgcagagtcaaggacatccgggatacgagcattacccagcgatgcaaagtggaacggagatgtactaccaaccggcacctcatatgtctaccggccaacagccgcccccgcagactgtcacttctcactacggccaacaacaaccacctctgttacacccaggtcctcctcaatactccccagctccctatggaagtcagtacggttacggaaatggccttgcctctccgcagacaggaccgccctcggtgtcaaacccgatgggtggtggtcagccagtcctccctctccccggcgtgaaccagccaggcatgcccaacaacgcatacacggccggcttcgacacgactggccaagtcgcgccaccgggcatgaaaccccgcgtgacagcaacgctttgggaagatgagggcagcctgtgcttccaggtcgaggctcgcggcatctgcgtcgcccgcagagaaggtttgttaatccattgtccaagccatggcaccgcctctgtttgctaactctgtcgctcagacaaccacatgatcaacggtaccaagttgttgaacgtggcaggaatgacacgtgggagacgcgatggtatcttgaaaagcgagaaggtcagacatgtggtcaagattggccccatgcatttgaagggtgtctggtgagtgtggctcgctcttcgtggcgtgaggtgacctgctaacatggttctttaggatcccatttgacagagctttggagtttgccaacaaggagaagatcaccgagcttttgtaccccctattcgtgcataacatcagctccctgctttatcaccctgcgaaccaaagtcgggccaaccaggttttgaccgcgacggcagagcgccggaagcaggatagtctgcgcgcaggtcaaccaccaaatggcctgccgtctattcagcagcagccgcagcaccaccatcactcgatgtcccttcccggtcctcaacctcctctcccatcgcattccagcatgggccgcccctcgattgatcgcgcgcaccccttccccacccctcccaccagcgcttccagtgtgatgggtcctatgggtgcctctgagaactttcaatggagccagcagagcatgaacaacggccagacgagtcagatctcgattgacaccactttgagcaacaatgcccggtcgttgcccaacacacctgcgaccacgcctcccgggtctacccttcaaagcatgcagaattaccccccggtcagccaaccatatgacagctcgcgccaaatgtaccaggcaccgcccccgcaacagtcctcatacacttctgcgaactccagcacccaggaaagatccatctacggccagtccaactacgtaaaaactgaaatggcccccccagccggtcgcgccacaggccagggaaacgagcagggtgactcgaagccgcagaatgggctgatgcacggcgaaaaccaacctgcctctggacaggaagaggaagccgaccacgagcatgaccccgagtacactcacgacagcggggcctatgacgcaaaccgcaactcgtacaactacagcaacccccaagtggcctcgttaccaaacgaccacgctcatctgtctcccgagatctctggttctccccaccaagctggttccggaagagcgactcctaggaccgccgctgccccgcaatcatactatgcccagcaaggttaccacacaccaccgcgcgcacccggtcaaccgtcaagcaatctctatagcgtgatgagcagcgaccgcaatgctcccaacggaaccaacggcagtgacgtctatgccagccagccggacatgaactcgatgtcaaacggctatgcgccccaaccaccagtgctgaacggctcaacgtccttgaagcgcggtagagacgacgatgacgacagaccgagcagcggcggtggcggcatgtcaatggacatgaagagacgcaagatgcttgatggcagcgggtcgatgccatcacccactttcaacccccccatggcgcaacctgcttctaccattccttcacaaagacggaggtaatacggcgatagcatcttgattttcgcgacgagtaccatcattagcggcgttgggggaaattgtgagtctgaacacgagacgaaccggatagtgagagacgggtgcttctgtccaagctctctttgcagaaccagacggcaagctagttctgtaaaagcgaaggcagagaccagacgcaccaaacacacacacatacacccacactccttgctcgttttctgtgcaaaatcttgcttttttgtactcgctcaagacgaacgaccaacaacgaagggctcttttttttttctgggagggcccgggttctcaaggacgattgctcaggcgagcaaaacagctgacgattctctttgttggatgcttgctgatatggctgtacatggctgatgaattaacggatttttttttgcatgggctggctaggcgggtctaatcactaaagaggatgggccaggggggtgagagcagcttctctcatcccttgggttcgggatgacatttttttcttctcactcgccaaaaaacaaagaaggtttttgtcggaaccgtcgcctgtttatgatcctaggcgcggaggcggcaaagaaatgtgatgataaaacgggactggacctttttttctgcttctctggggctggggctgctgttgtcgggtttcgtggggggacaaacagcgacgattactcgacatagagtcgaggatatcagaggatgtcgattgggggatgtgctcgcactggttgattgatcagcgatgaaagtcctggttgacttggctggtgtggtggcataggatctgtttgttgccgttataaactgtttcccatcttctgtatgattgttcgaattggtcggtgagcgttccggacatgatggaagaaggaaaggcggttagcgggatcagatgagcgaaagcagcagctgcagcagcggtcgcctatgagtgagaaagcggttcaacagacttttttttttctctactctcttatccattgttcacttttcctagctcatgacgcttatgaccaatgactctcgaatattattcttctcttttttttctctctctttcaattgcttcaaacaaaagttgcggggggggggggtacgatggaaggggatgggataggggaaggcgtgagggggttaggggttgttgttgttgctgttgttgtgtgtatgttgttgctgactgatgatgatgtcaaatgatggatggtttttcgttttgatgtcgtcgcgcattggaaatggttgatgggttttggtgggaagggggatggatggttttttttttttgattgttttttctgttgtgtttttttgtttttgaggtttttatcagagtaacgactttatgagaaaaaagagagatttaaagtttacaaccaaaaaaaatgagtgcctttgacagatgcgggatgtgaagaagacgggagaggaaataggggtcgtggttttgtgttagttgattttgtcttgtgagataagtgctgtggttttgtttggttttgatctgttgttgacatcatcatcaggggcggcaacacggcggcacggtctagtttgcggccggtgagactaaggggatatgattgatggcgggtagggtggtaggttaacagagaccgcgatcaaatgtcaaggttgtgtttgtagttgtttgtcatggtcctctcatagactgcgagtctcatgtgccgccaatcgaagccggtcatgactactacatcctgacccatttatattcagggggttaatatacagtcacttgaacctcaggtgtagtcccttggacgaagctttgttggggcggctgtccttccaatctgtcgaaacatctggatggctattcaaggcatgaatgttgaaacggcgggtttaaggggggtggagacatatgcaagggacgcgcacatgtaaggggcaggtcacgtgtcataaccgttgctgggccacagggataaacaggcacaaacgctggcctgagtcgaaatgattggctggccaggaccaggtgccgtcgcaatcaaagcaatttcccccagagggacaggccactggaagcactgaatatcagcgccataactcggtgcaagtaccaccagcatcacaacaacatcccaccaccgacaaatccctttttgcacaagattagctggctggatttcggggctctctgcttgcgatttctactgacagattacctatctgcagcaaacctgacgcgggtaactgacttgcttttgtccgtgtacacactgtgatcgaccgcagcatggcagcgccgttatcgccgacgccgagcgcggctctcaatttctcaacgccatcgggcagcctgcaccacggcggaccgtacgaagctcgaccttatttgatgagggattcctccacctcacaaccggaccgttatagcaccgagaacggcgccgtcatcgtcgaggagcagcagagcagcagaaacaaccaccaccaccaccaccgcagccgcgacgggtcgcctaccccgcgtggaccctcaccgcccaaggttcgccctggttcaacctcgcgcatcatgtcgggcaacgaactttcaccgctcaagattctgcagtcgcaccagcacgcgcaggttcaggcggcacaccaacagcaaagttcagcctcatcatcacagcccacttctgccgattctactagtagtggtcaacagccagaagatctgacgtcgcctcctccgccaaggaattcttcttccatgcccccgccgccggcgctgcaaagcccgagaaaagcaccgatcaagagatttcccatccgagtcaaccagcccggccagttgtcctcgtccaacgaaagctcgcgacgcccgtccaacgaacgccgcgggtctgacgagcagcagcagcgattgggcagctccatgggatcgtcgtcccaccggccagaaaatatgctggagaacgagggggtgaagcacgcgattgagatttttgaggacgacatcaactctgatgatcacaacgacgatgaggttgatatggatgatagcaacaaccatcacagacggagggacgcagacggggacgagaggatgggcatgcaggacgaggcgacgatggatgatgacgacattggcgcgaacgataccatgaccagcacgtttagcacgttttccgcggtgccaaaggcgacggttatgggcatgaggagtgacagcccgaccaagttttccatgtccacgtcgtcggggccgacgccgaggggggggagggcgaataatgggacgggggttccggaccggtcgggcgcgcagcagttgtatgacggtgggggttcgacgaatctgatggactttacggagaatttgcggtttgggagttatggagctcagcctatgccttcgagacggggtggtcaggcgtcgctgtcgtcgtcgtcgacgtcggggaggggggtgggtgctacgccgcagaggagtggggttgcgaatctgcttgattttgatatccccccggcgccgacgccgaggagcgttccgactattactcctcgggagctggagtcgctcaagtcggggtttttgtcggagatttcgagtttgaaggcgagcctttctggcaaggaggctgaggtgcagcatctcaagactgcggtgggggatgcggagaagagggtgggggagtgcatggagcagcttcgtgagattcaggatgcgcacgagtccctgactaccgagaaagactcttgggagcgccgaggaagggagatggaggttgttctgcggcaagtcaaggaagaaattgtcatgacccagcgcgagagagaggagttggaattcaaacttcacgaatcagagcagagaagagaggcagcagagatgatggcccaggacgccgagtcgaaaatggcgggtatgagagctggtcaggcagccgggagccataacgcccctggacaggcgatcaacgccaacaaggaggtcgagttggccgtcgagcgagtagccaaggacctccacgcgctttacaagtccaagcacgagaacaaggttgccgccctgaaaaagagctatgagacgcgctgggagaagaaagtccaaggtctgcaggctcagctggacgaactgacgcgagagaatgaggacttgcgtcatgggagggcgaaccagatcaacaacctcaaccaccatcgcattgccgagctggaggaggagcgcgcgcagaatgcggctcatatccgtgagctggaagccgagagccagaagttggaggctatcctgaggactgtccaggctgacaatgccgagctgaggctgcttttggagagggagcgggtcgaaaagggggagctggtgcagctggcggaggagatgatgaatatgcaggccacccttgctgctgctgcgcctgcgcctgcgccggcgccggcgccggagccggagccggagcccgcgcatgctcctgctcctgttaggacgatcaagtccccttctcctgagccagcgccagttgttgcgcctacgccgagcaagacgccgaatcggaggcagagcatgcttggtggacctacaaagacgcctggtaccgggctgggagtgagatcgagcatgccgccgcccagtaggtctactgggttgggggtcacggatgagaatcatgctcctcccacggggaataatttccggatgagcgtcgggccaggcgggttcagagcttctggattgagggctccgggaggaggcccgcaaaagatgggactggcgaggagcgggagtgtagctgggccgcatgagaggaccaagagctcgagcagcggcactggaggactaccccgccccggatcggggcaagggagggggttgatggggagtattgagaagatgggcggcggtgggtacagcagcggttacgggaggagaaatgactgagggatgggttatgagatgatgatgccttgtacggattttgacgattcttttctttttcttttacagctttgattcttttttgttgttgtttgttgcaaaagactttggcgtgtggggcgggaagagagaggggggagttgctgcatgtttgttggttgactgtcattctcgatttgtctttctacaagcccatactggcggtgtgggcaatgggttcttgaggtatttttcgaaggaggaaaaaagttaaagtcagtcatggagggaggggtaaaggcggcgtacatagtagggaaagatatttcagataccccccctttgcatataggccattagctatttcatggtttcttttcttttttttttcccccaaggcttgtactgttgttcttttgtgcttcttgggatgggtggtgcttgtccggtttctggctatgatagacatgtttgcggcggattgatttggggcttgtatccagtatcataaaggcatctcccgttgttaagatcgtaaatttattgtgtaatcattcatctagtttctgccactggatatatatctcatgtcgatatggtcttggacgaacaaatattgaaacctctcaaaaggttgtaatctattaataattatttatcaaaaagtttcagctaggtctcctaagctaggtatcaggtaggtatcagggcctcgtctacaaagtcgtgcggtcgtttgatagtcataagtaatatacacgcgcccccgcccccccaaccctttcccctttttctaactccaattctttgtctcctcactgcttatcctccttgtcacacatctcctccaacctaatatccccatccatctgccccaactcctcattactccgctgcccgtgatgcaccacctttacattattccccagcgcctcatccatctccctcctccacttctcacccctcctcttcaacaagaaaatcgccccattccccgtgatccacgcaaataaccccaccatcagacacaaccaccgattccccatggcatcaatcaacggctgtgcaagaatcgctcccacgcaagagacaaagtttctcacaaagttattgaccgctaccccagacgaacttctttggggcatgaactctgtcagcattgtcgttaccgcaccaaagactagcatactccctactccaaagagaaaggtagcgatggctggggcggcaatgtacttgagccccagactagcagtgaaaccgtacacgatgagagaaagcgggtatagagaagcagcaagccacatgttctctcccatacggtcctcagggaggtatatcaatttgggggggttgacgcggtcgtcgaagcggccggcgcgaagtgcttcgcgcttcattatgtggtcgagccagcggccgccgacggtggaggcggtgatgtaccccaaggaaggagcgagatacatgcagccgatgatggtgcttgtgaaattgtagggtggagtggaataagttgattgaatggagatgttgaggacgaagagagagccaaaggccacgctggccgaatagactgatatcagcaccggtggatagcgaaggtaagcaaggacggtgagggggtcccaaaggaagcgcttgatggttgaagcggcggatttgatcgatttggctgtcgtggtgacacgggtcagagggttggcggttggatcgggggagctgatgggggctgtagccggcttcttgttggcaagtgtttctggcagacagaagaaaatcatgaggagcatgacgccaccataaatagtcaggaaccacatcgtcgaacgccaaccaaaggctccagataagctaccgccagtaagggggctaatcagcgggccgatgagagggccgagataaaagaggcccatagctctcccacgctcggccggttcccagatatcggcaatggtgccggcgccgacggcctgaacagaagctgacgcaccgcctcccaagattctcatgacgatcaacattgaaatattgacgctgatggcgctgagtgccgagaagacgacaaacatggtgaaggaaatgatgtaaattgtccggcggccgagggtttcagagaacgacgaccaccagagaggaaagatggacatggcaagcatgtacatggccaccgtcaaattagtaattgtggtggttgcgttcaactcttttgccaggtcagggagggcggctacacgttgtcagtcagcctccacagtgtagagggaagaggaagaaacaagactcacgcagaaatataccagaacccataggggcgccagcggcagctagagcaacgacagctgtgatggtccatttggtacctctcttgtattctagtggtgtctcgacttcgggaattatggtgaatcttccaaacaggccacgccgttgggatcttggaacgataggattgtttggtcgaacaaaggaagagctccgccgcgatctcgtctgggtgggttgagtaggagagagtacattctcacggtgtgataagcctatcccaccctggccgggtacatcatccacgatgacggcttcttcatcggtgcttatcgacgttcctgtgtggctgccgacctcgaactcttcttggcccggggacgatggtcggtccggcttggcaacggatccggaccgaccattctcgtcagaagagccaacggccatgacctgttagacttcgataagatgagtgctgaaaaggagcggcgggcctgtcgttggcagccccatatgataggggcaggttcgatcgatgacgaaataggaaaggaaaagattcctaacatctagtataaataggggacgatatgaaatattattttaggggaggtagagcttggccgggaataagcaggccgagtgggtgcttcgacatcctcggcatcgcttcttctggggccgttcccagtcccggggcacggtcaaacaagccggtctcttttagcgttgaggaaggagctggctgccccatggggaatcatccatgggagtgcgggtacggggtatgagcctgtagccgagcggatgggaacctattaccaagcagttccttccaccgatactgaatcaacaagcttccgatacccgttgagtttttgattcggacgaacatctcgaagcaccaaaagaagtcgcctttgaccaacggctcggaagcgaaagcggcgaaatcacccttctagacggcaaattcggcaactcgcgacaaactgctcctgttgccagcacaccatgacaaaccgattccaaccgcctcgttttgcacacgccttgtgcttactgccgtggcatcatcgataaatgaaaagtcgggaaacataggtatgagcgggaaagatgcagcatcgctgctgactgcattggagaaaatggcggcaaatccattgcttcggccggaagaggatataagatgaggaggaaggatcaatgttaaggagagcagcagtcctaacaggcagaatcatggagacactgggctatcggccgtgatactaccgtcctgccgggcacctcaatgggttgtcgttgaaagatgcagggacgtccagccctaaagactttgacagcaccccgcaaccccacattgactcaccctcgccctgccgcgttggaggggcacaacatgtgcccctctgtgtcctccgacctacggcctggcacccggtgacgacacttggaaaagaatccactgggatttttatatcagcagtaataaaccttcaagtcaaaatgtctcttaccagcgcctcccccctcgaagccgctcagtcggccaagtcagcttcccatatccttgccacactctcagacgatgcgcgcaacgatgctctcacagctattcactcgggactcacagctgctcgcgatgacattcttgccgccaacgccagggatctcgagcttgcgcgcaaggctgctgccgacgggcagttgagccaaagtctcgtctcacgtctagacctgactaagcccggcaagtgggaggatatgctcaagggcatcctcgacgtccgtggcctcgaggaccctgttggccgtgttactctgcgcacccaactcgatgaaggtctcagcctcgaacgggtgacctgtcccattggtgttctcctcatcatcttcgaggctcgtcctgaggtcatcgccaacattgccgccctcgctatcaagtctggcaatgcggccatcctcaagggtggcaaggaatctaccgagtcttttgtcgctatctcacgcgtcatctcctctgctctcgaaaagacccaggttcccaacggagccgtccagctcgtcaccacccgcgatgttatcccccaattgttggctctcgacaagtacgttgacctggtcatcccccgtggtggcaatgagttggtgaggtacatcaaggacaacaccaagatccccgtcctgggccatgccgacggtctctgctccatctacctcgattcctctgccgacaaggcccttgcggaaaaggttatcgtcgactccaagaccaactatgttgccgcctgcaacgctctcgagactcttcttgtccaagagtcggcgctttctctccttcccgatgttgccactgccctcgcagccaaggatgttgagcttcgttgcgatgctgcctccaaggccgctctcgccaacacccctggcctcaagattgttgacgccactgaggaggacttcaacaccgagttcttgtctctgactctcgccatcaaggtcgtttctggcttgagcgaagctatcaaccacatcaactcccacggttcccaccacacagatgttatcctcacttctaacaaggaggatgctgagacttttatgaacgctatcgactcggccggtgtgtaccacaatgcctcaaccagatttgctgacggaatgagatatggtttcggcactgaggtgggtatcagcacaaacaagattcactcaagaggaccggtggggttggagggtttgatgatttacaagtacaagattcgtggtggtggccaaggtgcgggtgactatggggagggtaagagacagtaccttcaccagaagttacctttggagtagatctatctcagagcgcttgacacaaaatcggtggatatcggaagacaaaatgggcatcatgaatgacgacgaaaagtatacagctcaacttcgaaggttatagcaattggactggtttgaaaagcttagtgagacaaaagcaaagtcttgccaaaattcctatttacatgttcaagttccgtgggcgagtgcgatgcgcaagacagtctcctctatcaatggcgacgctttgcgtatgttcttctgctgactaagcaaacccctggaagcccctttttccacggttcgggggggaacgaagccgcaagactacagttgcacactggcagtcttctctacctattacatattctccagtagttgaaggtttgcatgtcactgaagcttccccccaacagaaaaagaatgatcctttcaaactgtgattgtgtacctaggtacttgcttgttgacgttcgagtttctcaccaaacacatctcccacgtaacccaggtcctttatttccagaggaaagctagactgcatatacagctccgctgggcaaatcagaagaagttggttcgcgaaagggtattgcagcaagatcttcgccacctcattcacaccagaccggcatgcagtaggttgccgatggctcttcaaacaggtccattaatgcacgacgaccattgatttatgttgcatttccaacttatgtcaccgaagctcgttccccactgggcgggatgtaggacaggcagattcagccttcttggggtatacatgacgacttcacggaccgggcaattgatgcttttcaactacaatatatgctgttgttctctattccggtgtcgggacgtcgaagcttactaccctaacaagagcctatcaaaacacacatggctcaatgggacagacactttattttgtgattattgaagccgcagggggaccgtgacccagttgtttccgccaaggggtcagacgccgctgagctgcttttgccaaggcttcagacgccgttgagctgctttcctcaaggcctcggggtcttggtcgggttgagggatcatctgaatatctattttataaagtctgcttctgtccaacaccttctcctctcttgccagactttctcttcctgtgtctatcaccctcattgtgttccattctattgtctccttaagagagggccacaaaacctacctgtcaatagtcaagcccagaaccgatcaatcatgtcacgaatcctcaaagccatacggatggcaaagaagacggaaaaggcacctcgagataccaaccccgatctcgacagcctaatcatagcaaagcttgaagatatcgattacaaaatcaccaccttcatcaacacacgagatgctcccacacttcacgaactcgaaggcagcacccagtatataggaccgcagcaagtcctgaggactctcccaccgatacaaaacgatgttgacaacaacatatggcaacaacatgtgcaacaggacggcaaggctgaatcaaaactttgggaggcaaaagcatcacacattccaggccttgctattatttgtgtttttctgctgctcgttctctcactccttctccacccaacacattcactcggagttcacagcaagaccacagatagtggtagatggggtgttggttcggtgtggtgatatatcactacagttgcttttctctttggacagataacatggccgtgattagttgttctgagagacatgttacagttttgggtgtggaaaatgcggcttgatgaagagagaattgaggtttcttaccaagtgatgtagttgacggcttggggtagggattgggagatggggacgcgggctgaactgacatggtgatgtactgggctacgcctatgtaggtaggtaacaatgaacactctatcaaccacgaggctggcttgtatcgatatttccggacttgtatcccataaacaatgagagaagttgccctctgcagtcggcaaaaatgtgatgaatagcagaattagtgcatgtatgacatcaaaatgtggtggcctgtcacagtccagagtaccagactgtctctagcatttttatagagatatcttttcatagggtcaggtagagcttcaagggctcgcaggtaggtagggtaggtacgtacttcggttgatgccaatagtgcatggttaggtaatgtacctttcactgaagagattgcatcgggaaaacgacccctcttccgcagtacaagtgcagttttaatttccccttcttttcgatcccacccatctacaaaacgctgcaggtgggctcgttgaccgcttctgacgctgcatcaggtgcgtgtgattgattggtcggagcagaacctctcttagagcagcatgcagcttcactgatacccaaaacactcacaggatgactgcctctcttgaatattagggccacacgacactgcgcggctggcagacaaccaacctcataactcatcgctccgactcccacgggccgcctcatgtacgcttcctcttgctattgctatttatctgctataagtatatatagttcgcttttcccaatctccatttattcaatatcctgaacttatccctcgtgctcagacgactatcctccatcaacatccattctttaactctttactcgttctcaggcatcatgtttagcttcaagtctaagaacaagactggagaggagaacgaaagaatatccgaagttaccaacaaaagactggacaatatcaacaacaagctcttcaccattgacagcaaacttgacgctattcttaacaaccgccgtcacaatgctatatacgagcttgatgcccttctcagcccatccggccattgccagccctaagagatcatgaccaaccaatagcccaccccatcttacaacaacgacctcgccaagaacaagaagtagaaacagaagcccgagtcgcccagtcacaacctttgactgccaacaatgccatcataattttctccgtgggggtttgtctacttattgtattcttacttggctaggtaagcccacagtggcttcattgaggttccggagatatacctttgaaatcttctttttcttttcatgtatcgggcgaggcttgggtgaacataacatgagagtcaagagtataccaaggcacaaaattggaggtatgaataggttaacatgtatgtaaaagatgagagagattgggtacgtggaatcgaaagagactcagagacaccgtgggatacgccgaacctgggaagattcatactctttgttggcaggttggcgattcgcaggcgggtgtatgaaacgtagttcgtttattaaaagtcttctaattaccattcactacctctttcgacctctttctcttcgccaagcggtaaatccatacgaactcgtcaggcattcaaaacgttgacttaggtttaaataaacaaataggtctaatatcaccacaagggctgcaggctatccacattccatgaacagggccatcactattacgatatcgatagtactcatatgggttcctggcgttctgggcgagagttctgttaagcagtcagttctgaagcaagatagcccctcgcatgcttttgacacaacagagaagcacaaagcaccacgaaaaggtaggtatagtaggtatgttcaattctcacatgttctgcatagtaattcttggatgagaggaactcagctcggcttctaccaatggtgttagctcaacaccccttccacatacccctcctctacccacacctattggcaacgtactgcaaggggttcttttcagcaacgcccccaccatcatcacaagtgcaaaaagaagggaagaactgaacaacgggaataacgggaaacggaacaagcatgcccagttacccctctacaggttttatatataaacttaatgcctagtttcgtaaatctttagtaaaagccttacatattattaaggtaccttatattattattacttcctaactacgtaaaatattaatactaaaatatttattaacctttaaaggttaattaattatgttatgcctttttaaagctatactgtgacgaacccctgtacagaacctctgaaagggatacgggttgaaggtaacttctgacaattggttcggtgcagctagacagtgcacaacaagatgtctcaatgtaaacacaagataccatgaatacaactgtggattgcatactgcggaactgtctatctacaccagccagttcctccgtatatatagatcctggggccctgaggtgctcgccctgctacggccccgattacccatagcacattgcatcctgcaaagtgctcgtcgtgctatgcctctgatcactcgtagcatcttgcatcctgcagagtgctcgtgtgtcttggcgccatagcactttcgtccagccctgattggctgtctcctgacttctctaatgattggctagggacgtcctgcgccccacatgtggcgcggcctgctgttgggttaactgtgacatatacgtacatataaataaaaaacaaaattaaacttttattatattaacctaagattcgataacttaattataattaaatttaaaaatataaattataaaattattactttccttagtacctataataatatacctataaaatatgaattcaaaagtaatatttaatatatttagctattgatttataagaatattttacgatagttatataatattaataataatatatattaataacggtataacctaagatatattagcgataacgaaaagcctattagggaagaaaatcgagtttaagtttaatttttactagggtaaaaattaattaaatacgttttaacttttaattttcgcgtttactttataatattccttctttcgttcttccttgattaaatatttaaattaaagcttttataagtattcggttttttctttttttatattaaataaatagactttagggtatttaaataactaaggggtataggagatacgtatcttaaatcgctatcgataggtccattaattcggtatatatttcgatagttataccaaataaataataaacttaatatttaataaactttattaagtaagatttatattttataatataataataaataagacgataataggatatattattacgtgcttaatgtcacaaccctggtacaggacggttgtggggccacgggaataaggggccaatcgggagaacgtataggggagccaatcacagtgaaggcagagtgatcagtgtgatcagggcactgagcagactgagcagagtgatcagtgtgatcagggcactgagcagactgagccgaggtgatcagtggccttgggagactgatcacggcttggcacaaggactatatatacggaggaactggctggtgtagatagacagttccgcagtatgcaattcaagcttgtattcacggcatcttgtgtttacatcgagacatcttgttgtgcactgtttagctgcaccgaaccaggattattcagaagttaccttcaaccagtatccctttcagaggttctggataggggttcgtcacacttaactaaataattcttctcgaaaagttagaaatatagtattcctttttagctttagggatagttagatatatcctaaaagagggcaagggaatggatatttcgagatatctgggaaggccttttggtaataaaaccgcgagggagggacagttttgccgctggcagtcggtagggggctgttattagttatttacagtgcaggtttgtatttaaagaatagaagaagatagtcttcatggagctacatggatgtctaaagtcagatacttgcccaatgaagacgccatttaaggccaaaagactttgaagagataataacataggtgtcctgaagtatcttatcttgagaagaagattacaaaggtgctggttgacctaggggttcagaataccgcaaggtacgtaagactgcattttagcataatagtcgtattggaaggttcctgtaagtgttatgttggaccacatacggacggccttgtaaattcctatgtattgattgaagcctcgggtctagcggcgccgccagatagttgtcagccaaggtggtcgcccaagccccgggcttgctctctccaaacaggaactagcagatatgctggatgaggtgttgggcaagccgagtgcgttggcattgcattggttagatcaagacggagctacgtgagggacccacgatgaaggcacagcctttttgggcgtccaatggcattggggttcccatgttgctagataagtatctgcggcagtcacctggtaactcgtagggacaattctggtacctgcggcacttaccttgggcagattccagccgcatctctaacataccctatgtctgttaggtggtgccctgtgcgccggaccgacctacataaacattggacatcatgaagggtagtggcagaaagtggcgtggagtcaccacatggaaaaatctataacttctggattcactcttctccgtctcctattttctatatatgtggcatgatatttggacggggccggctattggaactgcaagatgtcctatgaaccggtgatcaggggtgttgttggctagctgttctctgttgggcgatggtgttcttggggatattttctagggtgctgccggctgtatgtaaggatagaagccaaaagcagtgcttaataccaaataacacaaccctcccaactgagtctgctgagcttgttaatacggaaaaacaaatgatgaagggacaaggccatattgatcaccacagttttattcttcaaagacaccctgccgactcctaacagagcccacaagaggcagatgtctagttaaaacaaccccgaaacaaccaaacataaaagatccagtaaagccctgacaaaaagaactccaaacgaccatgccaaaacccaagaccaaagaattccacaccaaatccaaaccaagagaatacctcaagtaatcccccccaaaaatgatcccgaataatgcttgaaccaccaggtaggtccacatcgaaataaatgccccaagccaaagaccccctttttttgaaaatgtccaaacatgcaaaagaaactcccccctatggttcacccctacctaaccagtcaaagtcccattcaacccccccttaacccaccccagcaacgacctccccccctccagattctcaagcccctccggcccgtcaaaaaccatcacgccgccaaggttaaacagcccgctcagtcccagctgtcgcagctgactggcaagcgaccccgcagcttgcgcgcctcccagtttggtgtaagcactcggggcggcatcgacccaggcgggaatcccgatcaagaacttcgtccccgcgatcgccacgttggagccgcctagggagaggatgccatctgttatgagacgggtcctagaaaagcaagcgttgttagcactcttgtgagcttggagacaaagggggtttggggtgctgccccttccttgcgccttcctctgatagtcaaggttgctccttcccctgtcctaccgttccttcctctctaacaagggaatttgctcaaaacaggaaggaacacggacgggaaaaccgccccaaaaaagggggaaggagcaggcaacatccccaaacccaacagagggaaggaacaccaccaccacctcctctagagaaaaaaggaagaagccaaactcaccatgaaagaatcgacgtcaagaacttctcacccccaatctcgtaccgtccggtgtcatctcctccaaagaatctctgccagataaagttggcttgggcgaggtacccaatcgggatcgacctgtcgggcgaagcacaccagggagcagcagacaaataaggcatctttgaagtgtcctgcaagaagttgaagcgcatcgtcgctgcgaaggtgccccagtagttgggggaggagtcgagttttgctggtaagagaaaggggttagttgtcatgaagaaagaggggaggtggttgagaggggggagagggaaaaaggggtagagtggtaatgtgttaatgtgcaaaaggggtaatatgttattgttgtaatgtgataatgcggcaaaggagacttaccaagatcaaacccatccaccaccgccgtcccaaacggcctcaacccattcacaaactcataccccctcgtcgtcgccggcgtcaccggcccaaacagctgccacaacttgttcgcaaactgctgcgcctcgctctccgacctcagcaccaacgagctaccgcccccacccagcgaccccagaaccttcttcccgtgcgtcgcctggcaagtcttgatgtcctcctccaactgcgcgtaatagtccaacccggagaaaaaagccgctgatacccagtcttgacgcccttgatcacaggcgcgagcgtcagtttgggcagcccgctgttttggtagctgatgtctgtgacgaagccgaggatgaccagatcaacgttgggatcggcacagacatcagcgagggagatgcgctcagaggcttgtgattgcccgtagtagactgacacgttggagttggacatggcgttgaatcggtagccgccctgcggggtggctgggctggtcgggagaggaaggcgggacgtgaggatgttgggaacagaaatgggaggacccaagtagatgaatggaggcgaccgagtagtggtcagcgtcgggatggcggtaggaaggggtgggaatgttatggtcgggagggcggtgagagggttggggaagagggttgcaattgggaggaatggtaagatagaaaaggttggcagctgggcggatggatttgggaaaggtgggaaaggcagaatgaagaatgtcggcaccggcaaaagcagaggctcgagtgagctgaggagacttgggatggccgagggaagggaaccgactgcagcaccaatttcgctgagcaggctaggcaagataggagcaccagtcgggatgggaatgttgttgccgatgggttgggtgatggctggcgtctgaatgggaaccaacccattaatgacagcgataaggccaggaaccaacggcgtttcggttgcaacagcttgggagagctggctcaaaatgttggggaggaccgcctggaccggagaggggatgacaaggggagggatggtcacggcaggtatggcaattcctgaagctgtgaagcccgaaggatcaacagtgaggtcaatgagtgctggaactcccacagtaccaacaacggggagattggccgagatgccactgacggagagggtcaggccgggtgctggcgagacgatgaccccagggagctgagtgcccggaatcgtaactccaggcagtagagtctcgggcaaagttggcaacgacacgcttgggagtgatagactgggtaaagacacagtcggcaaggtgagagagaggctcggtaatgagatggtcggtaaggtgaggcttgggagtgagacgctcggcaaagacaccgctggcaactccaaactcggaagcgtcacactcgggagagatacgctcgggagagatacgctcggaagagatatgcttgggaccgaaatgcttgggagagacgcgctgggcaacgagatcgatggcagtgtgggaaccggcggaagggtcgggactgagagagacggcacctggacggatggtaccgacacagacggcaacgacacagacggcagctgaatcgagggagctgacgggagggtcaccgtcaccgtcggcagaggtaacgtaatcgccgggatactgagcccaggaaccgtcagactgatcgctgggctcaggccaagcggaaggttggccgaggcagcaatggtcacgcctggaagcaactcgctgggaatgacctcgttgagcaccgacgagatggcaccctcgagagccgtcaacccctggatgatgataggcaccgggcccgcagtcacagtggtaagccttgttatcgtcacagtaggaaacccggcgatgggaactgtatcgttgcgatgcagagtgtggtcgtagccaacccgggacctgttccgagaggatagccgatgttcgacagagcgctcaaaactgcctcgggagagtattgtctgatagtggtgggttcggcagccctgggaagcgctggggatggaactggtggaaggaggaggtcaagcacactatcaaggagcccggtgacggccggaaccactccgctgaggtcgccaatgaggatgtcgaggaggtttggctgtcttggctggttgaaagacgcaaagtattcgagggttttctcaggggtgccgaacatcgacagcagacttgggtcggcttgacgtttctctagctgcccttcggagttgtctgataccgtcgaaggtgtgtcttgatcatggtctgattgacgcttctccaacgcttcttctgggagaatcggtgtaatcagcccttctaccagacccccgatgtcaagttggcgcttcttcagagactctttagacgcatcgtcaccggcactggggacgtcatggaggactggggcgagtactggggctgcttggtccaaaggagcagctgcgaccgacagaccgccgagggcgagggtgctgtagagaacaaagtatttcatgatgggttgtcgttcctagccaccatggctctgcttgatgatcccaagcttctctcccaaggatgccttcatgatggcatatgtacgacgggccgttccgtacaatcaaccatggacctgggagtgatttcgagaaaacgcgtccaaataattccttcagacgcgtgaaatggaatgcctctgccattctttaattcgattgctatatgtacgatggtagacataatggtgcgatattgtccctcctgcccagcccaattttgtgatagatttctccgcatcacggcaagctgtcttgactcctggaatgcggccagttcgcgtgctcccgaatgtctaagaagacggtccgctcatgtagggagtgatctttggccaccgataactgtcggctgtcttgatatatggggaccaatgccatgtaagcggaaaaggaagaaagatcccgaacgacaaggcagtgtacatggctacagtacactgtgttcgatgcatgatgcactcgcatctccatcaacgtatggtgtttcgactgttatccagtccggcttgagccacttggtcaaagctgcgatgcacgggtttggtggtgaggatatcagacgaaagtggtaaaagagtctgaggaggtttcatgatgccgtgggggaggtctgaaacatgccgccgaagaagtgatgctgatcaattgcagacaccggcagatttgggtgaacggtttggacgcgagccacttttggcgtcgtgtcggtttgtctccccgcggagagctcaatcagttggcgcgacgaagaaaggagagagacgaggggagaccagaagagggggcgggtgcagactctcggcgatgctgagctgaggttggcattgttgtgtcccaccccatttccatttcctgtgcgttactctacgctcgttggaggtttggttgggtcacatcgactctcccctctccggttccgcacacaaagaaaaactgaccccattccggccgtcaacaagagtgggaaactggggggcagttgacgattgatgatctcgattcttgagtagaagtcgatgataaagaaggtcaaagaaggatggcgtggatggttacctagtcgctgaattggtcagcttcggaggcccatccatgtgtcggcacggcgtgagaccttttttttcaggtggtggatgcgacggcccaatcccaagataccaaaaatgggttgggagactggccgtgtggcctgtgccggggagcgaggaggtcacggtgcgtgatgaaatccacgactcgagcaatctggcatagcgtcattccagtaccctagatatcttcaaaatctaaaatccaaaatccaaaatcatgccgagtctttttgtgtgtacggtcaggtgggctgaggtggtgtgtggctgctgctgtatcgtgctgagagaagcctaaaaacctgcacctccagggcaaactctggcgaaaaagatgggactggtgatgatccggaaagaaggggaaaggagcgcaatttgacgagtgcgcagcctccaatgaatgggagagccgatgattggttgacctgaggtacagaggtacttagggttggggttatgtaccgagaaccaggccccagaaaaatccaagacgagactcccttgctgttgttggagactccgcgcagtgtccccctcggttcgtgcgaacaagtcgactgcccgaccttattctttggcagcatgaaggcaaaacaggtggacagcccgccgcctcaccatggctgcgagggctccaaacttttcaaccattcccattcccatcgttcccattctctctttcccacaacacttcccgatgcccatcatcaccacaatccatcatcaccaccctcaccaaccaccacctcatcaccaccaccagccctccccgtcagcaataatattagcctgcgtcaggaataacgtgcaacgctgagctgcacacacacaaccagcaattcaccgcatcaccgccccgacaaagcaaaatttccaaccagccaaccaccacttcttccatcaccaactccaacgcccaccacaacgtcgtcggcttttctgttgggcgtcatggctccttccagcaagagcgccgctgcggccaaggaccgtagaaagtccaacaacaactcagctggtctcgtcaccctcagagttcccagcgccaagctccgagctatcgtcgacccagattacgtgaaggaagattcgccagtcaaggagtcgcctgccacatcgacgacgctcccggctgcgacggtgaattccaccaccgaaaacgcgtcggattcgagccccaatactccagccgccggcacacctgcacccccctctgtgagcatgggccctcccgccgagggtcccaagaagaagggcgtcaaaagaggtgcggctgctctcaacggagagcccaaggtccgtgggaagcctggccccaagaagaagcagagactgtatgtcacccttccatcattcatcccatcatcactgactgcccctttacctgatgcattgctgacacattacacagtgaggatggaaccatcgaaggcggtagagccagtctcggagctcacaagctcggtcccaaggccaaccaaggtgctatcaatgctggccttcgcgccctcgacagatctggcaagccctgtcgcaagtggagcagaggcggcttcaccatgaagagctttaccggcgttgtctgggagatcccacgctgggtcgcacctcccaagatctcgcccgagacttccacagactcatcatcagctccagtctcggtcgacggcagcagcaaggagaataaggacagtgccagccagcaactcaagagcgacacaagtaacaatggcggcgacatcgagatgaccagcgctcccagcatcagtgctgctccctccccagtgccaccggcacctgctcctatcgccgccgcctcttaaatcatcattgaaccattctatgctgtcagcgagttcattcgtttaataatccctttttaacaacatggcgaatcacgggatatgatttgcatcagccagcacagcacagcacagcacagcacagcacagcacacagccttgggcgttccggtttctttttcaggtgtaattggtgggggcgttctgattgcttttacttttcacttttcattgcaccaggtgtcacacagggcgagagcaggcaaggcaaaaactggaacaggggggacggcgacggagcggccgtttgcttcgtctggggttcatcatgacgcactggccagtcaggttcagtgtgtggcaaggcgtttaggagcacaagggaaagatggtttggggttttgggagagacaggagagacaaacaattgagtgactgtatattagggttgttgataggatggaaatggagtttggccttctccgccgtaagacagagaagaggcaggcaggggaacaatgaggaaaggggatagatcttttttcacttggtgctcatcaaacatcgtttgtcggtttcgtgattgggaattttaatgtctgcaaagtgtcggggttgccggaaaacaaggcgttcttccatggcgatggcatttacacctcgggcatcggtgttgaaaatacaatgaatcaacaaacgcctttcattgttcactttatgatcaatatttacacggtgcaaagatggacacaataaagaaggaaaccccagcgaacttggatcggatgaatgctccaggtcatctggtcaaagaggttctttatttcacaacaccttggctctgctctcaggcccaggggataattcatccggtatgactcgggaaaggccgtccacataaaattcaaaataaaaaccgcagagaaaaataaaaaaacctgtggggttttgttcgaccatgaccaggcggttacgtacgaatgaaggatggtgatgttggtcaagcagagacagtagtgagagaaaatcccccgatctgatttagagtgatcaattttggggagttgagtggttgcaggtttgagaaaatgagcagtcagcttgtgcctcttcctgtgtgcttcctcttctgtgtcttgtccggttttggttttaattcttggttcaccacatcgccattgcatggcaggattacgtcgagggagagagagagagagaggtacggaggtacctcgctatattccgtgccagtggcatcaagtaaagatgcctcaggttgctgtcggtgaggctttcacttgattggttggcgaggttggggaattccagttcagcaaacttgtcacgattatctgtgagaatagcaggagaacacatatctgtagacagcttgaatgaaatgttcgactcctcccctgatgaatccgaacatcggaacaagttgtccccccaaaagatgacgacgataaggcaagtgtgtcgtgagagagagaacgctttggccactcacccactgtggaacttgtgggtctccatagagacaagcgttgggggagaccccatgatcctgccagtgcccactgcccgcccagaatctccactgacacgccagatagggacccgcacttgctgccagaagcgacgtcccgggcacctcacaggcaatgattgacccgacttgattagaaagacactcagaacagaaccgagaagcagcaacctcgattgattgatcctcaccacggctttccccaaacatattcccctccctccagtaactaccaacctagccaacgcagccatcaaagccacctctgctaaagacgccgggtcctagaatctatgacatagcgtcccagcgacaagaaaaccgagggcacctagtaccgcttgaactgtcgacacacacacacctcaccagctacgcacaacgccccaattaccgtaaagctataagcccccttcaaccaccgtataacacgtttgtcactttacgaggtacggggctcgggtggccgtcttgcggtctggagatcctgccgtcgtcgttgtcgccgcccaagagctcggtagtgaccagctccacccctccctgttctttctccccctcagctgctccagctgttgccacccctcaccatgacgaacccataccaacagtcacagcagtcacagcacggcgcagccgccagcaacttccccaggagtacctcatacgcctccatcgtctctggatctcaacagcagcagcagcaatccgctacccgatcatcggccttggggttctcacatatccttgacccgaaccctgacgccgaactcgatacacacaatccctactaccccgagctcgatagacttttctcgcgacccaatatcccaacatttggcggtgccggcatggatatggacacaggatatacatcacgaaaccaaaacgaaaacggacacaacaataataataccaatagcgggccgtggccaccacccgcaagactaggttccaacttttcaatgtccagggcgttcgacatgtttttaaacaaggaacctttaagcttcgccgatgctgcagatgtggacagcgccgcgcataagggaaccggcgcgggcgccaaccccttcttgtccggcgggacagcgccaaactttcttgccccctcttacctccgaggtaccacctacctcaccaagctggaagagcagcaccgagcgagaattttggccgagagagaaagagaggctagcgtaccaggtgcgaaaacgcagacgagagcaggagtactagccaccaacggaaacagtcatcacactctatcgcccatgtctggaaaggtgcacacaggcgggggatcacaccggggggtggcctttgatgtggtggaaaagtcggcgttgagccagggtttggtcgaggaggaagtcaatccgttgccgtcgaggtggaacatggacgacagggaaccctccctagagctctcgggcgatggctatgaagttaccttcaccgggcggatgagcaatgaacacgaggcctcggcagtgagggctgatcaccccatgaatccggcctgtggcatatactactttgagatcacggtcctgaacaagaagaagtcatcgaccgacgacatgccacccattgcgattggcttctctagccagatggccgcgctgaaccgggcgccgggatgggaaccggagagctgggggtaccatggggacgacggaaactgcttcgccgcgcaaaacgtagggaaggcgtacggccccaagtttggtccgaaggatacggtcgggtgttgtatcaatttccggctggggcaggcgttttttacaaagaacggcaaggagctgagtaggttttgatatctgtgggaaatcaaaagaaggcggttgctaacatgtggaactgcagaggtggcgtttcgggacatcaactttaaggatgtgaaggcgggcaagttgtttcccatggtcgggctcaagaagacgggggatcacatctgggccaactttgggcagcagccgtttatgtttgatattgataactacatgctggtcagtttgttcaacactcggaacagggcgagtggtagctaacgttcgtggcataaacaggagcagcaacagattatcgaagacgagataaaccgtgtcgatacacgcatcctagcaccaggactgtcagaaacggagcttattcagcaattggttttgcaattcctgcaacatgacggctacgttgagacagctcgtgcttttgcggaggagatccattccgagaagtcggctcttcggcttagtgccaaggaacaggtcaagggcatcaacatcaaagacgacgaggacgccaacaaccgccagaggatccgtcgagcgatactcgaaggcgatatcgaccgcgccatgcgttacacggagcaatactaccccaacgtcctcaaagaaaacgagcaggtttatttccgtctcaaatgcaggaagttcatcgagatgattcgcaaggaggccgagatgaacctaaagttggaggatcgaaaccggcgactcgaagagcagcgcagcagacaaggcctgggggataatgacgaggagatgcaagatgagtgggatgacgagagggagttctacattgatcaactcgggaagctctcgatggaggcactggagtacggacaggagctgagggccgagttcaccaacaatccgagcagagagatgacgaaacacctggatgagatttccagtctgattgcctatccgcatccgctgcaggtgccagaggtgtctcatttgatggatgcgaaggggagagtggccgtggcggaggagttgaactctgctatactgagtaggtttcttccttgtttctgcccatgtgtgatgggaggcgttgctaactaatatgaccaaagcatcactcggcaaatcatcccgcgcagcactcgaaaacgtttacgcccagacctcggtgcttctggaggacctggcgaaggacgggggaccgggtgcttttgtgacgttggaggcgctcttcaggcagtttccacccagcaaattgctttagggggcaaaatcaaaaggcaaggaaggcgcatcaatggtggaagagatggaaacaggggcgttgaaatgttgtttggacatgagtatacagcccgggacgcgagagggatgcctgatcatcagcagacatgttaagcgcaacatcactaaacaatcaagagaatggcgcatggcgttactggaaaggggtggtttttctttggaccaaacatacaacagcagagcagcggatggaggagcggaatggagagaaacaaggcagcattacctggcggttctcgatataaaaccaactttttctctcctcttgtttcgggagttggtgagggtgtggtgtttatggtgctattcacaaccaggttgtctgttcagtggggttgttttttttttgcggtggtcctttctctctctctctatctattgggcattttggtctgctggcttttattgtgtagctcatctccatcctcagtttctcaccttgtagtcggctctccatctggcctctcgtgagtggtttggtggtgaggggaatcatctcagcttggattttgggcctggtttttggcttataagtatgcatgaataaacatatcaaattgaatataagttactgtgtcgatatgggaggtgagaaatgtgagggtgggttttgtatggtcttacggagtactgcctgttctctctcctgtccctatgccccttttcgaaaccctaaccctccactgaatggtcggtgcctgccgagtggcttttgagaacttgcatgccccgccgttgcgacttgccccaccatgagtttcgccgtttgagctccaggacagttttgtctttttgcttttgcgcaaccgacagccgcgattttgacacactctcttcccaatcgatcgtattatttctacaattagactcacagggaacgagcgcccatcggactctcgcagcgaaattctcactcccataccacacatcacccagaagaaagtaaaagagacatcatgggcgacgctgaacaacttcccccggtggccgaccagccaacagatgcaacaactacagaaagtacacaagagcagaaacccgacgacctcgaagccatcctggcgcgccaccgcaaggaactccgcgacttgcagtcgagggtgacgcaaaagaagaagaatgcgaccaagaagacgaggaaaaaggttaatgaggagtgtgctgagctggagagggggttgaaggagaggcacgaggcggaactggcgcaggttacgggtggcggcggtgatgctgagcctgagcccgtatcagaacctgaggaggaggggggaaaggatgaggttgagactgttacggaaagggttgaggaaatgagggttacaccaccaccatcaccaccaccaccaccacaacaacaacaacaacaacaaccagggaagaaacgaaaccggcagaaggaaagattggcgagacggcaggctgaggttgaggctgctagtgccagggcgcaggaggaggcgtcgcggatgacggatcatggggctgtggagaagcttcatgttgatggggttttgaagagggaggggttggaggaggtggaggttagggctgatgggcattgtttgtttgctgctgttggcgaccaactttttcggaggggggtgacggaggagttgttggattatagggaggtgaggagacgggcggcggagtatatggacaggaacagggatgattttgagccgtttgtggatttggagagtcagagttggaaggagtatttgaggaagataagggatacttctgcttggggggggcagccggagctgctggctctggcgagggtgtttggggtgggcattacggttgtgcaggtgccgaggaatgaggttatcaatagggaggggggggggaagatgctgtgggtggtttattattggaaggggagtaattcggggaggcattataactctttgaagtctgtctcttaggggaaggagggaggaatggactggatgcagtcatagagaaaaacaaggacttggaggttgctagaaacccttgttgacatgaaataaaaatataacaccttcgacgagtcctcccgactaccttgtcttcaaagaccatcaacacataaggctgatcaactacttggaagacctctcagttatctttgaacggctgttgattacgttgaaacccctcatttccagcaggagtctccttttgttatatattccacgacgtcaatgtttaaaaataaaaccatctcaacagcatcaccaatatcagaaatgctgatagcctttccccagcttccaagaatgtgggggagcaaggaaagcaagtcttggccttttggagaaatcgcggggaatttttgtcggtttggtacccaatcaggttaatgatgctgcccgttggggaatagaccctttgtttgtgacgacgaacctcggcttccggctggcggctgtctcctcctcaacggtttagatatcgattgtccatctctaggatttgtgtctagatttgtcggaaaaggacgtccttggggatatatacatctacccagttcatctcatcagcttgatattcttgcttcaaccaacatacaccccaacaagctgtcagtcacaccacagtacaaaatggacgtcaacaacctcttctccatcaaggtacacccccccctcactccccctaccctatctccccccccccttcctgctaacttccccagggcaaagtagccctcataaccggcggcgccaaaggcgtcggcctcatgatctccaccgcctttgtgtccgccggcgcaaaagtgtacatctcgtcccgcgacgccaccgcctgcgcctccgcctgtgcaaccctcaacaccatcacccccaactcggccttctccctccccgccgacctccagtccgaaaaagaagtccaccgcctagccgccgagctcaccaagctcgagccgggggggctgcacatactgatcaacaactcgggcgccacctggggcgagccctacgaaaagtaccccgacgccgcctggaccaagctcctcaccctcaacctcacccgcgtcttcaccctcacccaggcgctcacacccctgctcatcaaggggagcaaacaagacgatccggcgagggtggtgaatatcggctccatcgatgggttgcgcgttcctctccttccaacgtttgcgtacagtgcctccaaggcgggcctgcaccatctgagtagacatcttgctgttgagctgggaccaaaggggataacggtgaacaacctcgcgtgtgggccttttccgagcaagatgatgaagcatactttggacacgatgggggaggtgatcaaggaggcgaatccgttgggccgagtaggacagcccgaggatgtgggcggggcgtgtttgtttttgtgcagcagggcggggggttatgtcaacggggctactttggcgttggatgggggggttcatttgatggccaagatttaggggcagagagaaatcaggaatgggagaaggttaatggggttatataccaaagagcgaaagatattccctctgtttagaagtggttgcgttatgcgagcaagaagcgttgaacaatcgaccggcatgtgaatatttatcatatatttacataatcatgtcaagactggacatcttcaacatggggagatggccttgtgaaaatgacttcaagttccggctcccatgaacgttacacatcatatgattatcctcatttgacaagtatcaaaagttgtacaattactattcgtggttgtatgtaaaagacccaaaacccagatgcaccttgacggtagaaacaagatatgtagtgaaaaacccaaaacccgaatgctcatcccataacctgtacacccaaatcctaatacgccataattcctatcccactccctatacccgaccatgtgtgttgttgttgtgccccgtgatgatccgatccggtgatccgataatgataagcgacaaagtgatgagcgatgatgttgacgaaaaaaacaagaaaacgaggcggggggccttgacgtttctctggagaaatgccccaccggttcaactttttgtcccacctctccttctccaattcttccttctccaaccctaagaagctgatgacgccagcccagcgaccatcttatcaaaaggaggaatttatgaaaggcccacgctctcaaaatccctcatcagcaccgccatttgcgcccgtttcgccgcctcggcgacgagtgtgaagtccttgagaaaggggtctgtcgatgatgtcttgggcgtctgtcttgggggcgggacaatcttggaggacgaagaggaggccgaggaggaggtgaagggagactgttgggtggaagacccagtagaggtgaagcgggagtccatcttgtgtagcagtggtgtttgtatcgtggtagtgactgacgatgttttggtttggtgggttgtatgtgtgcttgtgtgtgtcctttctaaaaaaagagagaaaaagagacaggagcaggccgagcgaagaaaccagttttatgtacccgtccgaaaggtcggtgagagaaagcccgagagtatgacgctggcgcaggaaaaaaagaatccccttgcaataatggtagttggggctgcggtgggaggagattagagacaagctgggtccttgcctgtgggtggtgtagtgtatgtggattccttcgagaggcaccacagagaaagaaaaaaaaaaagacgctcgctcgttcgataaggggaacgtgggcaatgcgtccgcgggagatgttgtatcaccaccacctttttgtcttcttttcccacacgaagaggagcaaaggggggcttccgatcgatcaggcgcagccggtgagatgggtagtatctcgtagcgaacaaagcctgtgaaagagagaggtcctcggctgaatacaacctagactgaggggaggaggtaaggtaatttggctggagttgtgtcgtaagagggacgggatgaggaggctgcaagctgcaaggcaaaaagcaagatatgcaggtagatgctgccggagggagcgctctcaaacgatgactcgtgcgtgatgcgcactgcaaaaggcccaaaggagttttgataagataaggccttgatcaggtcaggccagcgagaggaggggatacagaaaagagtgggtgcgggcaatattgcgatattgggtgtttataactgtcggtagacgacttggttgcgtgcttcttgctgctggtgggggaatatcgatatggtgggggaccgaggggtggccgaggggggaaacaatgaggtcaggacagaactttacgtatacgacaacacctcgacgggagagacacggcagggcaagcgagggggagagggcacaggggagagggaacacagagcgatggtgttgatctagttatagacaacaatgaatcaatcgcccgtcttttatttttctttatctcgacatcgtccccacgactggaaacggcgtcatcggtttccactcctgcccaggctgctgcccctctttagatggcgtcgaggttaaaaaagagacatcgagatacctccgcgaaagagccggcaccaggaccgaacacccgttttgcccgtgtctttgcctgaagacgcaccgaacggtctcgccccgcaagtacctcggggtcactcgcaaaagtagcgtcggcgcatgtgtccgggatgcctgctacataccgtcaaaaacccccacactctgcgacgacaacaactcgcaatatcaggccagtgtttgctgttgttgtgacattgtgacagccagacagtcacaggctcgcgccttcggcctcagctaaaacactcgccccaatctccaaatccccatgggggtcgtaaaaatccgggggactgatggctggggccgagcttgggtcgtctggcgtcgagcttgaaatgtttcgacatgccgaggggaatctctctcttccaagctgctagctcgggttcacgtggaaacgcaaggacgcatgggaattgctgtcggataggtgatcgagtgggagagtaggatccagggaacaacgaggattcttcggagctttagcttccacaggctgcagcccagttgcccaaaaggattccaccgtatctccgatgatgcctcttggtggtaggaaagcaggggtcgcctggcggagcctcaatcgcctcggcagggctgctgcatggatgaggacgggggagaggaacggcgacaggcattgtcggcccttcgcccggctttgacacttttcttgttaagttggccggcgagactccgggttttttttttctcgcttttctttcgtctaggcaagactagcgtacaattgccaacgaagagggagcttcctgaccggtcaggtcgtcccgagtggctttccgtccagggccgcagcggataagatggtggcagtccaggccggcgatagattaaactcagtacgacgccatacccaggattttcctcggccggcgctgcaacacaagcgacatggccctgcgtcgagaagtcttgaccgagacatccttcagtccgctcttcctgaccttcctatttcaaaacgtaaaaaagactcgtcctatggccagggaacggcgtctatgggcggccatcgcggcaagtaacgacctcgtcaagaagtatttagccgcctccaggtcccgaagttccgccagatgaattttcacggtggcaaacttttgagatactcggtctaatcacgtcaatcttgtttcttctttttttttgggttttgctgttcggcaggtacgggtattgtcgattctgcatccgaggaatctgatgatggtggaccaagaaggtaagcaatcgatattaaccaccaggatgtgtcgatcgtcaaagtgtcactaggaccccttctcccacatgaattccgcaacgttgctcttccttccccccctcctaaaaaattgcggcattctatgacatctcgcggcatcgaagaatggcacaagacagtcagctgattcatctgtcttgggcagctgccaccacaccaacagccctactatttgctagacacaaatgaaaatagactctataatgccacgggaacccctcgaagttgtattgggcgcaggaatctcgaaccgtttttccaatatgaccggttcgtttattctagaaaaaaagtcgtgggggttgtgtgcgcgggttgtggtatcaatcacggccttgcattctgtaaattggggggtttgagagagataagcctggaccgttgttagggtctaatcgataagcgcacctcaccccgccaggggcaggcatcttccgacacggatacgggatagccccccggcatttcatgcagcttcccgcagcgttttggacccacccgcccgaacttctgcactttgatcggtggggccgccgatgtcagcaccgaacattcagaattccatacaccagcagcacagcaacagtgacgatggcctcagctacagcaaccccaccaaaaccctccgcgaggccaaaccagccggcgccttcgctgtggtctatcccagcccctctccaaaagctcttcaaccagttccccctcgtaaccctcgacccgaaccccctcccagcgcggtctcaaacccttacctcggcgtccgacaccctcccaacactttatatcttctcctccgacgaggatgcgctggaggggaaaccatcaataaacccaacatgtcttaaatggcaggtcagtggccctgtccccttgctcccgttcctgtccataccccagctaacccccctcccccaaccatcagaccctcctccgcctctcccacgtcccctttctaacctccccctcctcaaaccacgcctctcccaccggctccctccccttcctcctcccgccccgaactgtctctcccaacccgatcccctcaacctccatccccctttacatctcccgccacaccaactccccaaaggaaaaaaaaacctccccgcgttcggaagcctacctctccctcctaacccccctccgcctagccttcctccaaactctctacctcacccctgccttcacccccctcctcaaaaaattctacatcgacccatcaacccgctcctcagtcctaggaacaatcctccaaacccaactatcagccgcagcctcctccgcagtgttgcaaggtctgggtttgcacagccagacaggaacaggcggcatcgactctgagaacctctacgccgacgcagccgaggctttggactcgctcgcgatcctcctgcaggaatcccaaacgggctggttttttggggaggagaaaccgggcgagttcgacgctgggttgtatggttatgtgggggttataatggcgcacatggacacgccagagggcaggttgggagggctggtgaggagagctgggggtggtggaggagagttggttggctggtgggaaaggattagacgcgaggcatgggggggtgatggtttatcagaggggggggagaaataaatgtgtggttgggaggcggttggttgcatgatagagagacggggaaaatgcatatatgaaaacaaaggatggagagatacccaggcataaatcagcattccaaaattaaattatttgtctctttcttgtgtcatcatcatcatcatcctgtgaaagacagtgtctgcctatcatctatatacacttcgtcagcactccaatcttgaaaatcaatacgcacgacattaaaggggtaacaaacacacaaaacacaaacaaccacacccaagataaacaaaaccggtgctttttaaaataacgctgcctgctgctatgctgcgctcgctaatgcaaataactttcccaaaaagctctgcgacattgaccaccgcatgactctgcaatcatcaccgtacccctctccacattttccacaccctcagtcaacagtgcccagcctcgcggcctgcctgtataaacacaataccagcccatccgtccacctgcagatcttctagataggtacacgtccaaaataaaactaaaaacaaatacatcgaatggtaagagagaaaggaaaatagagccacatatcaatgatggcttcagctgtgttgcgtgcgtgcgtgcggtaaatggtatcactcttccccacctccctgataatgataccctcccccccccccccaaattaacgttgtagctttcccatcttttgaaactcccaagagaaactcatgtcttttggatagagatgtcgcccaacgcttgtatagaaatgacaataaaaaaaatcgacgtcagtcatgactgcaatagtgattaagaaaaagatcaaaagcccttgaaaggatcgtccctcgtataccattcatccacttcattctcagtggttgctctggtacctcggctgtggtagctgtcccgttgtcggctccggctggcttgacgcctcgactccttgctcctcctacgagcagcatgtcgacagtcgtcgtcccgctcatgggcatcctcatacggggtatcgctgaatcgactgaacgctagagggctgataaaggcctccatgcgcacagtgccaatggcgtcaaagaaattgggaccgtttggccggttcgaagcttcagaggtccgcaccgaccctgttccccaggtaatggcgctggatgcccctgtgatggcgctcgccgctgcattgctataaacatccgatgatcccgcaatgctgtttcctgccgtactattcgatgaggcatggtggcctccacctcctagcggtgtcgagaagcctcccgagaagcctcggaaggagagcggtggtggcacgtggccgccagtgttgctacgcttgcggccgtgtactccacgctcgccataccgtgtaatgggaggtggtgcagccgtgtctgtggattcctcgcgcgtgtgggatggaatggaatagagatcaggcatcggtggccggtagcccccgatggcggggggtgcgctgtccacctccaatgatgggggctcgatgggatcagacttgatcaccggcgctccggtcttggccttggtaaggcgaatcgagtctctaatcggtcgccgtactttgggcttgggcaactcatactgctccggcgatggcttcgcttgtggcacgggcaaactctccgggatggcctggttggagtgggcaaggaatgaaagcgagttcaaccagatgtaatgacgctcggcgctggaagccgtaaacttaagggcgcgttgcggcgtcaggatcaagatagacctgttgaatagcggaccagctcccctaggaggcggattgtcgtccttgacatcaatgacggactgaatcgtgactgaagaggggttagtatcggtccggaacattgtgttgattcgtgaaaacgtacgcttgcggccagatttgcccagaagagcacctcccgtggtcggttgcttgctgctccagaggatacaacgatcatatggctgaagccaaacccatctcttgtgacgatcattgctggtgtcatcgccacccttgacatctgccatcccaaacgatttgcgtctccgcacatacttgtacatccactcacccaccatcgtctgagcaatcgcttccacaaccgtaaatgccttctccttcggttctgcctgcgaagcggcggccgtctccccagtggttgccgtgttggacgagggctgggacctgtgggacctatacttggcgtacgtattggactccttgtgccgcggcgtagtaatgtcatttgatggcaatgggggaagatccgggctctcggggatatcgaccgactcgttgaaacgagacggtgagcgagatggccgacgcctctgcccacgcggaagacctgtggctgagcgcaccttgcgaatgctaccagcgcgataatgactccggctcgagcctcgtctgtgccaagtatccgaccctctactcgggcttcgtccttcacttggagcgctaccgctcaatggcggtttcctcgagctggcgcgtgtggggatcgggaatggtggctccttggtatctgtcagacttgggcttctagccctcgagtgcgagttgatgccgctctggatcaaggcagctctgcgcataacactggccttggttccaaacgctgggcggggtccgccacggcgagagcccgagctattgatcccggaatcccgggtctcgcgagtctgagagatgatgttggtcgagccgtagccaccatagccatcaggctcatcagtcagacgcggcgagtatccgctgctcgccttgggtgagaaagcagactcggaggtctcagagcctcgcttgcccatcctgctcgagctgtctatggtcctaggagccgaaggcgcagataatgctgtcctgtactccgagtcactgacgtcgagatccataaactcgtcaccctcatccgtgctgttgccatcaaagccggcaaacaggctgctgattctatgcggcctcctgattgcggcagatcggcttgatactggtccattgtcattgttgccaggataaacatctctagcttcttctgacacaggggaagaaacaacaggcggcgacgatggaatatcaacgatgcttcgcttgctggtcaaccggcgggggttgcgaggtggtggcacatctccaggaactggagtgaatttccggaagtcatcggtgggtaaatctggggtgggtaaagctggcgagactggccttgacgtgatcgctgaagggtgcaggtgtggaggcaacttggccaaacgcttgtccacacggatttcctctgtctgcatagaagatgatgctgtaggtgggctagagatcaaggacacttggcagccaaagtctttggtcaactgcggcaagagaggctgtctaggtgtgctgggacggcttgaaggaggaatgatgctaatgctgggaatcgacagaactggaagctggagcggtggggcaatgtcctctgtctgggtagatgaagagaccatggcagggatttgaggctttggcgttggggccaaatcttggaaaggcgtcctgggcgtctttggtggactcaggggctgttccagtgtttgagaggatccattgaccatcaaattgctggtcgatgtcttgatggcaagtggctggccaatttgcacccgcttcttcctctggtttgcttcaatttcgagatcagcacggggcggactgttcatgttgtacaatctttcatatctctgcatgaagggtgagggctcgggtgttgttggtttcactgcagtgattgttggtgacggcggaggcgatggctgaacaccagtgtcgacgtacacagcctttggggctactgactcagtctcgtcatcctcttgaatggtgccgccctccagcctctctagagccgtagcgctaaaagcaagccttgatcgatgcacgcttccggatctcatcaagctatcattgctctgtcctctcctgtgcgtcttggacatgatgctgtcccggctcatgttgcgtaaatgtgtgcgatgatgcccattagacagcacactctcccgaccaccataatcgctctcctcgtcaaatccgtccagctcgtcggccagagagttcatcccgttcgtcttgggggaagctaagagcgaaaacctggtgttgctggtcaaactcatggttcggacactggcggcatcattctccctgccgctctcctcgccttcgctctcgtgatgattgagtatcccattctctccagcgacttggacggcttggaatgctgtgacttcatcaatcaccgccttcagtcgactttccgcaacgtgaatcttccgctccagctttcttttctcctcttcccattcgtccttttccttttcccattgtcgatgtacccgttccgaatcctcctcctggttcctcagcttcttctgggtaatgtcgagtcgttttttggtctcggcagctgagtcgacagcctcgtcacgttctcgagccaactcaccaagtgccgaggacgttccaccttccagcaaggctaactgacgttttaatgaccggctctccttgtctgtagataccaccctggcctgaagagactcggattcccctcgaacagcatccaatgaagattccaggctttcaatgagcttcaacttgtcctcctgatctcttcttagggacagaatctccgataccagattggcatgcaacgttggcgtaaaacgtttgctgtcaatgctgaccggctcatcagagcaaaactctctcatagacatcatcgacgccctatccatcctctcaccattgagcggtgctggtgatcgactctttccattcttcccggggggggtcgccgagcgttttgacttgcgtgagcctcgtgatacgtttcgcgaagggactcggtaaggtgtgtctgcaggtgtcggcaaggacgcaaccggtacggtcgactcatcttcggtttcccatgcgccaaccatctttgcggcctcttgatatctcggttctgcagaaagatgccgcctcgtactcgatacaggcgaagaagtctagcacatttccaccaaccgatcagttgtcgggtattagaacggacctcggaagaggatgcaacggtgatcactaatgccttcggactgagtggccatgtccgcgcagttagtagtgttccccaaggtcagtgtgtttgaaacagcgatcctgcaagatgttgcataaggcacggggttacccccacttcccaaacgtcaaagctgatgctgtggaatatgcgtagggctttcgtgcgcccagagttgaatttatagcatgatatattatgagatgccgttcttgggacaggtccggcattgtgagacttgcgttcatgaaggggcggggcatgaagggtgaaaccatgttcaacagaaacaacttaccagacactcaagacccaaaggtcttgcactagagtgagggttcgcagtcggtatttccaaccggcatcccctcaaggcagtgtgggcttgtgagggggtggagctctggacacctgatgggtttggctgaagtgaggaggcggggcgaatgcgtcaagtgttcaacctcaatgacggaagagaagctaccacaaggcatgtgtgatcagtacatcccatcccgatgctcgacctaatgtaggctaccaaagattgcccctcaggcctgtgacccaagagatcgtcgttcgcacttaccgagcaccacttgtagcttgacgcaggtgatgtgtcaagcaaagtctaatagagtttggaactggtcggaggaagccgcaagatgcacgaacgaaccaaggggtatcgggtatcagaaagtcagaaacaaaaaaaaccggagaaggaagcgaaggatctcgtgagcgtgagcgtgagtgttgtaggtgcgagagagggcgtattagcgagtgtgagaaaggtataagtgaggttgagaatggaaaggtaaggcgtcgccggtcagcgtcgagatgcgatgctcgtgagacacgacagacagacaacctccgaacccgaagggaggaagaagagagagacgtcgtcgacagctacgagacgacgagcatcgtggtttgacaaaagtcaagaggcctggtcgagttatgtacgagctctccacttttcgtccactcgttccatcagcaaatgggctggtggggcctgccgaatgacagccctggagcagttcccacccagcagaccaggggctactcgggaagccaccagggggcccccttccaggcctttttggcctgttccttttgtgacgttcgagttcaagtttcccgcctgtcccacggctggctgcagacgggcgacgaacacagtctgtgctgcggcagacgggatgaagcgtctgaaagagtatcctcacaagataatcatttccgcctcacccgccagaaaacacgcagcaagagtctggtctgcttttgtctgcaatgtccgaccgagcgtcttgagtgccatcacggaccctgcccaaagccatgtgtcgcgaatctgaacagcccagttcgataattacactacgacgctggccacacgcccgaacacctgggtctggaaaggggccagccttacttagcaattcctggagttgatcctccatcatcattggaaaggatgggatacagttgaaacggccagcaatgtgcctgctgcaatgaaatcacattttcctgagttgagccgttggttcttcaacacttttttgcatcgaggtggaaggatgtcccctgtttgcgcatattcaagtggcccaagctctctcaagcttcgagaaaatgtcccgagcttggatcctggccatctgcagtagctcgttcatgttcatgcagcatcaactgacacttgttgacaggcaatgacagcagccttctttctcttcctcgttgttctgctccttcaagtcatcagcattcattcatcccatctctgaggcaaacaaagcattgccatgcagtgtcgaattaaacacgctctcaaccggggtcaacctcgaaaaaggggaatgggctaagcctctttggcgacaaggccttctgtgacgggcggctggcagcgaatgggaagccagtccagagcgagacaaatttccagatgtgatggcctgctgccgatctcacgaaaccctggcccgaacttgctcccgaatccgcgcaccgtgaactttaactgatccttaagacagacctgtgcgggatcgaccgagacccacatccaccccgaaataagcctccagatggagtcttgacacagcaacggagtaacatctggcagtctcatcatcaactcgcaacaaagacttgaaaattctatggtggtttccaagttggtgatgtggtggtgtaggcagtgtacatacatgtgcgagcgtggcgtggcacatgtctcaaacttcgggcccagtcgaaggtgacccaaaggggaattgtggaggtccttaattgcacgcaactccccccctcccccactgcgggagcatgcccgctcgccgtaccttatcaccggaacgccagggaacgccaggccttggtcaaccagctacctaaccgaatgagacggttgttcctctttcttgcgcgcaggcaagctgagaagtgaggcgagccgcttggcttggccgtcatctcgactggatgatatcaaaagttgcctgccatccttcaacaagaggactccggaggttcaacgcctgtgccgctgtctgacgggaagcggcatcgaaaactgtggatagatatcacagcggggaagcaacggcttcctcgcggaattcggactgctgctgctgtgcgacagtcaaccaaacaggcccatccccatttaaaaggtcccggccccggtccccatcccgatgctacacacgtgcaaaaaggaccccgttttccaagattcaccggagatcggatacggcctcttgccttgactgtgaatgtcagtcagcatgatgatgaacaacagcgctttcccggaaaatcagataacagaacacatttctgtctcatggccaatcatttccacagacagctttgactggtgaaacggtcgtcacgcaaaaagaaactggacgaagaagaaaacccttgcccaatccacccacgccaacagccaagctgcggcgcccgtcacgggagtttgaagattgattggaagctcagtaccgggaaggcaagccagcggcgttggaggagggcagcattcaccctccaacaggttcagcaagttcgaggccgcgtctgcgcgaccccgcgccctttttattttcaacgcgttattcgtcgagccattggccaatcagtgtttggggtttgactgcaacaaagtaggaactttgaacttggtagcggggtgagtggtgagtggtgagtggtgagtggtgaagagtttattactcgaagttgagggccaacgcggggacctcgttcagctcaatgggtttggtcgaggaagacgaaggccagtgttgggaccagcaggatcaggatttcgcaatcgagatttgggaaagttccctcccctcatcagtgccctgccaccgaggtttcttggagtcaaagagccgagagggagggtttacctgcctctcatctcaacgctcaaatgctacgcctctgttgattacccggactgactacccaggcacttgcggtcaatgaacccaaccgagccgaaaggctctctcatccagtgagaccggtgccgaagtggtattagcaagacgacggtggggatttggttgtgtctgatgaagttcggttcatcacctcgcctgcctcgcatgcggttgaagttttttgctctccactagcgaggctgcataggttattgcaaccacggaacgggttgtggtcaaagtcaaaacgcagagggtatattgctcgctacgctgggttggacggtccggtttttgtttggttttgttttgttttcttcaactgttgttgagttgtttcttttccattgttgctgggtttcactttctccagaaacaaaagctttctcgagttcgctcgcttataatatgtgcttctgttctgcatcactagcatgctttttgctgcatgaatgggccttgtgctgcaggattttccagtgcggttctgttgtttctcccttgtccctgcagcggcagtgcagtgtaggtttgcatagaaggtacatacgcgccgctccgccgtaagctgtcacttacatgcatacatgcagttgatgatgactgcatgttgtttatgagggtctgaaacggaaaatgcgtttttatatattggatggatggatggatggatgggtacgggaggggtactatgggaaagggaaagggatggtcgattacttgcagccggtccaggtttgtttgtgatgccggtccaggtttgtttgtgatgccggtagtttggggggttggtgcttggccgatggaatcgtcttcgaatgactttgaacgatgatgtcaggagaatatcatgtcatgtctcaggatttaatagccatgagggttgggaagtagagacgagtgttttctgtgagaccatgagactacttccatgagaccggaggttttacacctcagcttacaagggtgataagtatcaccggtctctcggcccgtgatggcaacatatcggagtgaagcgacagtcgcttgatctcgtgatctatctacctgctacaagcgcacaccaccggacaagtgcctgggatggtaggtagagttgaaacgagacagccgagacataactccaggtacccgtggaaagcaagaaatgttctccttctgcgccacaaggttggtttgtgggccgagacatgacggacagagaaatgcttcgtccggctctgtccggtgggggcatgattttggtgtcttttgcgtcaacactggacatatggcgtggtgaacctagctcaggagaccagaagcgatacctgctgtttaatgattagaaaacaaacagtctgtctctgtggctgtcgtgtatcgggatcaatctcgcttgcgtcgcttgagaaggttgagatcaactttgccgtcacctggtaagggggaaatagggagggatgttgtggtggattacgagaaaaggaaggatggaggctatggttgagtcgagatgggttctggcatctgggtcccgcgatgctgttaaaatcttatgaatgatagggaggggttatagttttgagactgagagcggttggaagactgaaggaattccagggagtgtgtagtaggtgagagtggtgaaagcataacccaggaagttgaagaggaagggatgggactctgggggagaagaaataaaagcagcaaggcaaagttaccttggaatacatacctgaaggtcgtgctggcacatcctcctgaacctaataaccactaatgtgagcaaccagtatgagatttcctctgatgatgaaccgagataggtataaacttgaagtcgagtacaagctattgactcatacaaaagatacacatggaaactctcattgttagtcctccacacaccaggtacctagataactcaggtaggtaagtaaggtaccttgagctgtaccaataggaacagcaggacttgctcaatattctccatcaacaagtctcgtaatgaccttcttgcttactatattggttgatgttccttccaaactctacagctccctggcgtgtttctgttttgcatcaccgtaggccctgaaccatcctaacgtacctcctatgaacatgtgttccaagtgaactgaaaggccaagatgacctttgcctgctgaagcggcaagctacgtggcttgtttactttttattgtgatgaaataatagtgaacataaggtaatctttgacctcaacacattcaatctcgtcagcgagaagccttacaataaacgacatttctgtgtctttttccacaatcacatcctcatacctttctacaaatgcttctagaaacacaatggctacatgccgtattcgacactctatgtcttctgcacagtcatcttatgctttgagtagatccacatgtggtttcccccactgcatataagacgacatcattagtcactacgggtgcttcttatatgttcttatgtgtaccggctgactggttctcgacctaattcagagaacagagttcactgccatatcaaacctcgcacacctttggcaaaagctttactctgacaatgaagctggtctcggaaagctagctttctgctcagtttacatcatcattatgggaattagggccccgaaaaagattcaataggctttcaaagatagttgaggtagttgataggcccatcaaaattcggccctagctagcatgcctccagggatagccaacaggctttcagaggagctgagaggaatgaccgtcatcctctgcagtcttttcccatcgtagttgtccatcattacacccataatgtggtcacgtcgatagagtatccattcaacaactggtgtcatatatccggatcactattgagcttgaatgggggaacaagtacatagccttcctcatggtcagcgaagaactggataagataaatgtttcggtctctaatattatctccaattttagtaatctaactgtaaagcctttatcaggcgccagaagacaagggaatgtacgctcagagttccagacagataccttatattgcatataataacagttattggaacagaccgtcttccgagtttttttgcagcacaaatcagtaaccgcagacggtgggtgttggaggcatggagagaagcagatctcttacatcatacttttacccagtttgatagctttgttatccttgataatatggctttgattcaggcagagttaaacctcgatcttacggtgtctctgttgtgctagttcttagttgttccaaatcttgggcgtgttgagaggcttcagaagtctttgaactcttctgttatgtacctactacctatacttaccaactgacttataaccttgtctcgcctctagtacctaccgcatgaagccggtgagcaatgagaagcccatcccattttccggattagtctgcccaactcagccatgcacattaaagtgtcctggcaacatgataactccaaagactaccaggccccgacttcggaccagactggttaagatgccatcagcccgagagatggatttaccatcggtgaaattctctaaattaccttatatatgccggtcgatctcagacccaatgcccggcaccctcccatcatgcgaacatagagtcggtatcccaacaattacatggtcgatgtcctagtatagacatgaagacggagtgtactgacacccgcgatggacttttcctatctcgtttatcacactgctcctgccactgtctcaacccagctcatcagtcctcctaccttcgtgaagcgcccagctgggccagtccaacttaggtcgcaagacgggagctaaaaacggcggcttatccatctcgatatcaagatcgtcctcgaaaggatcgcggtccgctgtgcctttccctagacttcccgtctgtccgcctcatctacttgtaagcaagacatccccggtccaactgcattgctctttatctctctgcttggtcctcaagagtcaaagcgtgcatactttcatcatgtccttgccctgaaagttgttagatatcaccaatcctcccgtcttggccatgccacccccatctgtccggaaggaactgctgttgtaactgaccggtaaggtgagctggaggaccctgaaggataagggaagcgaggataagggttggtatacgggcctaccttagttaactaggactctttaaccaagtcaggaaaggtaatggtatcaatgggatatctatagcccggtatgcgttgataaggacctagcaaggtgaggcgttcacgttcgcttaaccttaccaagatcgcaactcctcccccatctttcccacttgcgatgaaacgaaacatctgcgccatcacaccggtcgagatattgagggaaaataatcaaatgttgataatgaaaaactaatggcgcaagaaacgtgaaaaaagagcacacaattcagcttgacaaaaccttgggtagccttccaccacccgcgaacgtgggggcttgtcgaggaagcaccttctcaaaatcatcacgaaacttccgtgccttcctacaccatccagccaaacccgcacgtggacgataagattcttcacttttggtgtgtatcgtgccctgccctgatgattgtgacgaaattgttcctgttcctgcccaacgctttcaaacatcccacatgagagagtcaacaccctcggtgaccgcgtcaggcaggtcaccttgggtagtcccttgggtaaatcacatcccaatcttttttacctgtcaggtaccgaaatgatgccatcccaaatgttccctctctctctctctctctctccccccccaaaaaaatatgatcttgcatcgatccctcattccccaaaaagccttgctggcggcgcatcacgcttgtccgtcccagcaccaacctcccggaatttcccaagttcccaaatatccccccccaaaaagtggacacccggcacttgcccacaaccaaccggacactcccccggaatccctcctcgacgttgaaagtggattttctttctggctaccaaaaaaatctaaaagtaagcaccctgatggcctggcctgccttctttctcttttctgacacaacccatgtggaaacacaagaggttggcggggggagcgggctccatagcacggtactgtattgaacttttgtgtagcgctatggggaatctttgacatagatattccagcggtgaggcaccggtctccagagacaggacgaattaaaaatctttacggagtaatgaacggagcaccccagcacggagcgaatcccggtggttcgggatttttctcttcaagcccgaggattttcattaacggggggccatggaaaaggggaagatcagataattaggttgggaccttccggatgtgttcaaggggccgggaggccggtggtcccgcccccccggggaccggagagggatacccggagtggatgtttgggagtttgctgggtcagtggagttttttagttgttgaaaaagttcggaggtgtcggtatcgactgatgataatacctgttgaatgatttgaaggaataagatccatggtcgaagaaaaaggggatatggagacaggaaaagagagagggtaacattcaatcttggctcttttgcgtgcatctcggcccagagagaaaagaggtgatcagcaacttttttggcactgacatttacaagggtctctccgtccttcaacggtcttgatgccgttgccgaccctccactttgatatgccaacagctgtcttactttctcacccaacccttcttgtgaaggtataccgatttagccgggctggctggtgctgcagttcgttgaccggtcaatgcaagcccatctttgccgctcattggtaaaagaggaaaaaaataaaataaaaggttagttttcgatagtccatcgccaattttttttggcatctggatctctattgaccgaccaaccaacctacgtgtctccccacgatgtgtgttgtctctgtaggtccagattcgacatcacctttctcagatttgacaccgtccagttagattatcgccagagcagtcagatggtgtcaatgtctcagctgtaaaagacccttttggggagatatcaagacagcacccaagctggactcctggcgtaccgtacccgtcatcagcacgtcaacgtcaaacctcccttgattgaggctttcagcagccacggcgccaagctgccaacttttttgacgaccgactgccatctcctttccatcccatccctttccctcctccaagaaagtaaaagatcaaccataaaactactccgtcttactcctccgcagccaagcaagcaatccacccgttcacctgaaattttggaaccagcaggaacaaggttacatttttgttctggcgctttcgaaagtctctcgagattgattatctgtgcgtaaaaacggtggggcagctaagggagcttgggccacatcgcatcatggcgtgtgtgtgcacgaaccccactatactcaagtcttggaaggtgcttccgaggtgaggtgagaaagctcaccttcggagcgttacattttgaatgtgattttttattctgatctttgtcgaggtttgaacgttgctatcgacatatcgtggtggtgctcactttgctcaccgtgttctcagcgttagagcttgatagttggtgtattgagtacgataccttgtcatccccagcctccctactctccttggatctagagtgaacaacgcatacatacatacatacatacatccatccatcgcccttggtacaaagtacgtaaactccctcgattctttgtggatgggttcgggttcggatccggaataaacccaccgaacaacaacacgacataggcacatacgacagagagagccggtatttgcgggtgatagtcccgaagagtaccggcaaacaacgtcgtagagagccatacttcaaagctgtttggaaatcgccctgtttgtgttctgcatattcgagggtccgtgaacggagcattcagacatgggttggcaaatcccatttggatggacctgtttgggagattcggatggaagctcacagcacaataggcacatgtaaattgtttgttttaacttcttcattttgcttccttgctactactatcttggggtattcttgagctatgcaactacttagcaggtaaaagggtaaggtgggatgatgtgtggtaaaaggcaaggcaggccccaagaattggcagaggggaaagggagaaagaaaaaagcatcaccacctccgtcgccatcgccgtctttttagatcatcgtgattccatgtccgtcgtgtcattcatctgctgttgccccaatgtgcctcgctcttcttcccctcccatctcgctctctctctccctctctctctctcttcttcgtagcaaacccagtcgcctgcccttcttcttccccaatttttgtgtcattgcccccttccatttttaccaaagaaatgatttgatcctgtaggccctgaaaaatgcaggtattacaccacctatccctcccccaaactgtggcctagaatccaatgcctcccagatcatcctttcatcatcaatgcctcgggttgaatagacatacgctccctccttgatgactccgtaaataaagcaactgcagcggcttgcccgaaaaaagagatattctcaagatttggtttggcgataaaaaagagaatgaacccgcacctctccccccacaccctctccccctttgtcgaaagaaacgaaatggatatttacgccccaatgatgccctcttttgatttaatgcgccattcgccgtgtcggtgaaatgggtaatggttgaattcgattgctgcgggaaatggttgtcgaaaattgagcaacaagatgccgaggaattcggaaagaagagataaagacgacgaatcgcaagctgccaaaattaaaatccagatgcatattagttttcgtaaaaaaagctttgcgaaaaaaatggccagcgtgcatatcgagcccaaaatttcgcgcaaacccggctgccaagaacacgggggtgttgtgtattcaagacgtcggttgccagaagggagaatatgactgagtggcggcgaggcgagggaccgaaggaagccgctcataatatgacacaccccctgcggcgctcgctttgtgtgcgtcggtatcggctttccttggactggatggtcgaatcggccctccttgattcgtacttgctgctgccggttggcgagaggggctgggaagcggcctggcgctgtctccggagaattctaaccacatcgtaaaaggccttgtccacgttgatatagttcttggccgacgcctcgacaaactcgcatcccaactcgcgcgccagagcgtgcccttcctgtgtagatacctcgcgttccgcaatacggtcgctcttgttccccacaagcatgattggcacgggtgccgccgggttagccgccgagataggtgaccctgggtatgaaggcgacgaggccgtcgactcttttactctttggatctggcggtggaacctcttgatgcgcgtgaaggacgagcgggacgagatgctgtacactaggataaagccctcgccgtctcggatccactggtctcgcagcgctgtgtactcttcctgccccgccgtgtccaacacctcgagcatgcaggcttggttgtcaattacggcttgctttcggtacgagtcctcaatagtagggtcatactaggaagggaagattataggttagtccaagatggcacaagggagggggaacaagacaaaaacaaaacatactgtctcgacgaagtgttgcaagcagagttggatagtaagagcggtcttccccacgccaccgtcccccagcaccaccagtttgtatagtaccattttgcccgccattgttgcgaatgtagtattgggatgtagtcgtggttagcagagttctcgggggtggtgcgaggctatcgaacgagaaggggatgcgtgggtggaaacggagcaaggctgggtgggtttggtggtgcgatggattttggcggaagagaagtgcaccggcaccgggcggagctagtcgcgcagcttagaactgggccgatggagaggggcgaccgacgggagagacgcagcactaaaggcacggaaaacaaggactcgagaagaggtcgttgccacggtaggtagttgacggggattggtgcgtgcgttacggatgatggtggtgtagtaagtgcgtgcgtgcgctgcgttgcctgagagttcgggtggtggttgtggtgaagggtagatggtaggtaggtagtgaagtacgcagtggatagtgaagcaagtgtatacgaagaggtagatagatgctccggctcgggacggcaaaaaaacgcaggcggggaaagtcttttcaaagacaagaactcgagtgtgcagttgggagaagagaggatagataccagcagctacgggtaacaggacggcggtgggctggcagtgttgagtatggagcaccgagcaatagaatagggagggcggcggtggagcaaaaagtattggagttctctggtggacagatgcgggcggaagtgggcggctttgcttttttggagtcccctaacgctttagggtgggatggctcgatgggatatcgggaccaactctttggccaccctggacactcgcggctggaggcttcagatccgcgtggtaaggtcccgggtctgagagagagataaatcttgatcttgaaaagacaaaaagattatttttctaccgagttcttctgaggccgcgggcaatcggggaagttttgatggaaaccggcatggggtagcagtaatacccctcaagaacagcttaataagaaaatcacaagcaacctggaacctctctctccaaatacctggaggttccagatcaccacactgccttgggcaatacctgtcaacaaagactcagtggcctgaccccatatcccatgggccccatgatggacaaccagcatatgagggacctggatatctcgccaaacaagtacatccggcgggtccgttgagctgaggctgggaaaggtaaacaaaggtaaactggacctttcctctcctacccgaccttaactcaatccattcacggcacacagtcctgatgttggaggaccgagattcaatgtcagtgacctctctgaggtgcagacgcaggtgcctcggactggcacgagcgcactcccgcctaccactagagtgccccactctccaccactggctgcccgcaaggcgagcggtcctgtcttcgctcgaccgcctgggccaggcctgtgttccgatgcaagacagattgcagaacatgacatctcgccaagaaccgtcagacagacctcaccccgagaactctcgcccttggctggccggcattcgcaattgctaagccgggccggcatcagggctaaagacgttagacatatgccaatccccccccccattaccagccggggacaaagtgtgggtaaaacagtcgtgagattcaaacttcttaggaatacaacagcccggatgctggtgccgacccgttggcgcaacatgctgcggccctcaaccttcccttcctgcggccagcacagcattgccgtggcctcgagtctgcagggcagcagagcatagagcacctcggcagcttcaacttgtcagcctctcgctcgctatcgaggtgtgtaagcttgcagatgcagatgaccaggcggttgcccgcagccccgacccatgcaatccaatgtattggatactttgacggcgggatgattgcgggacaacctctctcctcactcactacattctccaggtctctggaacaaaaccggtactctcaaccaatccccaacatggaatccgtgccgctttgtcttcttttccccctccaattgggttgccaccgacatcgggttctcttgcgagcagacaagtccagacgattagccgcgctctacggctgtgtcgacgaatcttgcggcaagcaaacggttgagatcgatccgaggttggcgcccataagtttgtgacttttgcaacaaagaacggcaagatcgccgggacgacacggtggtcacggcgatctcacgtctacctctacggcggcctttatacggaccgtgacacccccatacctaacagcagccggtctcgtcgctcggcccgggagaaagccctttcgcccagggctgtccgcgtgtacatgcctcggggcggcaacatgtccagacagacacgagatcgtggcacaaaacaaatagattgccaacttacagcggtaagctccctccccgcttccctagcttcgattccatgcagacagcggaactatgcggcgtcgaactatctgcatctacactgctgcttccccgtcacacactctatcccacgtgcagcctgcttgttcaaacggggccatcatccgctgctgtcgggtgggctttccctcaataaatgtgtgggcctttctatcaagtctaacgcctcctgctgtacgtctgtacactcacgataatcggtctaccctgttgcaggacgaccaagtgtaacactaagtgcagatggcgggagcctctttggatactttgctttgccccagattcctgagcattgggctctgatttctttgagactgaattctgctaactgttgttgaatgagagctgtcagtatgtttgtcctcacgagtatcatatatgacatatccctccccaaccaaacaaggatatatccctccttgggtagctcacgggaccagctgttaatgcggggacgcataaatcaagagtccatcgtctcaggggctggcctgtgagcctgtgatccgacatgggagctcccgacgagccgcttttagcacagtacaacgccgtctgtcatatcacatcccacatcacttttactcttcctccccaaccaacctattcgccacctcctccaacccaccctttccgtcgtcaagcccaacccagagatccacccactcttttgctttctcgtatctctcctcgtcgagaccccatctctcttcgtctggacgctcgacgtagacggttttgaagctaagtttgtgtgcggcggctagatctcctaggtgagctgccgccatggccacttcttttggctccaggcctagcttttggcatgctccgaggtagacgctcgggtgaggtttgtaagctttgaagtcctccgaggagcaaatctcgtcatatcccaggtggccgtttctgttcagatcctccaagcatgacttgttcccgtcagataacatggccgtcttgaacctctttctcagtctggcgatcccggcagcggaatcgggccatggtgtgagctcgtgccaggtttggactaggagctcgatttgggagggggagaaggtgtcgggggggagggagaattcggtgaggagggcggggagggagtcacggtggtgggagtcggttgttttaaagggattggaaggggaggggaggtaggagccgcagaacttgccgtgggagaggcgccatttgacggcgaagaggggccagtctacttctttgaaggctggaggggctagagtacggagggtggagatgatgtgagggcgccagtttactactgtgccgaagatgtcgaaggtgagggctttgacgccggtgagggaggggtcgggcattgtgatggtgggtattgggggtaataatgggtggtgtgtgatgtgaaaaggtgatgagaaagtcatgatctggtttaagagtgagtataagtgaggggaagaatgattaggccaaccgggcaaagccgggaatgcccggagatgtaatggttggttgagagagactggttcacgtctttgaggggattgcatagcgaacctgaagagtaaagatcagcaatagcaaaagtcccgtacaatatatcgagatttattattcagagaatactggaagtaccagcatatgggtttataacttcatcacagctcagccaaacaatcttaacaccgcacctgacaacacatgctaagtaggtacctacatacgctacacaacgtagcaagtcaacaagaaaatattcaaaacgaaatacatgcgctacgcctttagtttatctacgtatggtgtggcagggtaacccttcccattacgttgtatgtccaacaacagaggtaacgcctgaataccaatctctatagacgctaccacatctctcaaatcttcccaccactttgggctctcccaatcacaattttaatctggccgttccgccattttgatcctcaaaaagtcaacaaacactccgttttagccgacagacacaagaccagtcccctcctgttacagtcccaaaagctctcgtcaaatcacaaatctcaaattgtcctggacgtagtacatgatatctgtctctagactgcatacgtcaaagacctgtcttttgattcaacagagcttattttctgacttggctcttctcaccctactacttttgcaatatctaccttcgtatacagcctccacaataaagcgggacgctgtgaacgtttcatatctccagaagaagaggatcgacgtacctaccatcaaatattgtcgttcaaacccgccgcgtgcgtacccagcatgtcccgtcatgcttgtcgcagcgggcgataacacaaggcaagcacaggcctggtatatacgggtcttctggcttcgagtccaccttcctcacgcactaagggcggggctgggttttctgtgatcagcagtgatggggcgatgttgatagtggatgagaacttcggacttgttgtcctctggtgctcgcttgcgaggctgcctggctctttccatcgcaacctttcttgggattgttgttcggcttgcgatgtggttatagatgcccgtcgttatgggcgggctgtgtggctgcacgcgctgctctggttgagatgatgatagggaagtgggaggtaagcggatttagggggacatcgtggataatttgttggaattttctgtgggtgtgtgtgtgtgtgtgttggaggacgggggcttgatattggttcaacgtgatgttgttagtggaagttttagttcggggggacgggtttatggactttggacagtccttcatttactggagagaaggatatgtcgaattgagtcttgttaaaagaagacgacgagactttggtagttgttgattaaaatatttggagttgaggcaaaagactgtcatatgacattggatagatggataatacttgggttctgactttacacttcattcgtgaagatggattgtatctcggttatcgtggacaacgactggtgctatctcagggacccttacactattttatccaactagactcggcacctttcttcttgtgctttacaaatatccctgaatagtcccagctataaaggcacaaacccaagacagcatcacacgctctgaagaaatgttcaatcactcatccgtcatcgaggtcctacatcatgcctaccttacttccacgcattgggatcatctttagcaggtcgtgggttttgaacgtgcgcgggcgctgcttcccggctgtcttgtactgtatcaatcggcaagaaccttcgcaattttttcacaaagggtggagagggaaaaaatcaagatctgcctgtttttctcatttggcgatggtggcttggaaaaattgaagggagggttgagcagaaggagacgataatatatctacgcctgtcaagagcgctgccatggatgacgccatctaccgaagctattgctttgctactcttcccctaggaaaggaaagcgtaggttccctcaagactgagaatggacagtaactgtcttggcacgagtcttggagaaatgtatggttcctgatagacgaagagcctgtctttcttgtatcatccgtcttgttggtgcaactctttacagtccctcccaatacaattgcaaagactccaaccgcacctgaaaattggtgctcactgtaaaactcaagattatgtgacctaaaaggcgctctcttgtttaagtagacacgtagggagaaaaatgtcgccataatgatgaaccaagggttaatatatgatctctacccaaagtataggcagagattgagtccagttattacagagaccgtatataggggggagacacccgatttagagattctcagaaatggaaagtcggcgacgacgagttcccttgagatttcacagcctcgtcatgtacctaggtttatctgtatcctcggagcacgattccaaggtttttcttgttgtttctatgaacaaagctttgatagctaacaagaagggattttcacaacggccttcccgagaaggcttgtttgtgtcaccacttatgcaaggtaggtagtttgtcattcagagcttcgaggctgaggttgtcgctatttagaatttggatctcggcagatatcttgcatcactaaaaagctatgcccaactggccctcctatttctttgggaatcattttagcatcaaagagggagatactcctccatacaccaccccaaccaatcccgccttcatccttccaaacggcgggcagaattgctgttttgacagcaaggcctcaaagagcccgtaggaaccaggcgcaggcagcctcgcgttatgtaccacatctggagggtttttgaccgtccctttcggggaaatcttgagcgtgaaagaaggggatgacagactgaagcgtcctgccagctctcagacgatgaagcaattcggttgtgaagtgggaatacatgaagcgagaccttgctagatttggggagctgagtcaaccgccaacttggatgccccaaggaaatcttaaagacacccaaatagagagctgttttccctcatccatgattcaccaacataacttctatacatggcccaccagcattctgatagcaaggccttgagactatgtcgagattactcttcaatgtctttcgaccatcttcaaagacctctcaatagatattcaaagacctgttgactccgagtagcagtctccaattatgctgtccacgatgtgaattccttgatggaaaatagccagtagggccaatgatgaacagcacctgttatgggggccaatgtgttgaaggtgatcaagtcaactcaagcagagcatgaacgctggattaaggggttcaggggcattccattcacttcaacaacacatcaacacaagtccagtcacagcaacacaaagtcaagcccacaactcatgtattggaacctgttcctactaccatctcataaaacccccttcaaactctccgccaaaagaatccaatacactctcaagcttcatacacccgcttcaccgcaggccggtcattcccctccacccaaagaagatacacaaaaaaaacccattttaacgcccgcttcttatctgttcttgccctcattttcaagaggggtctgatatatcaagaaatccaaaacataagaaaatataaaaatttccacgaccgtttcatccgaaaaagtagatcacaaagaagtagagtaaagttgctccccaaataaaccaggatatcgtcagttcaaaaaagtcaagaacacatcaaaagaaaaaggccatccaaaaaacacctcatggtgcggcatgctcatcgccgaacggactcctttcccggttcttgactggtacagaagagtctctttgagacgcccgtcgtgtcgcctcctcgatgacagcactgaggttgttactactgatgctgctgttgtgagacggcttcggtgggtcagaaaacggtccgagatcgttcgtttgtggcgagtcaacaatgatggtagcggcggtggagtctctataggtatcgcccgagacggtgataggggaagagagggtatcctgctctgatctcgctttgctgctggtgctgttgccgttcaacttcttgatgcttccaacccgaacaaccatagccctagccggcgtggctgtgtgggtgctggcattgttcaagaaggtagacccaacgctgaaagtgctgttggcgggacttggcggccggagagaagagtacttctcgtagtctacagtgggaactgggggagtggcggtgccgctagagttgttggagttggccgaccggacactaaccatggccggcttcgctcgcatacccgtctgcgcgggagccacaacaacggcgctctttccatagatggtggacgccacgctggagcgcggggcgtacgaggtccgggcgtaggaagtacgatcagtgtaagaggagatgccagagtaagtcgaatcacgcaagtcacccgggatgaagaaatgctgatcttctgtgctcgatggagtgccggcctgcgagtgactggcaggaattggcggaacgggaggaaccaacactgtgggagaggctgtggctctgttggtaaccccgggaatataggcgatctggatgatgttcgaagcgcgggtaagaacggtggaggcaatcgagtgaacagtatgggtggaggcgcgataatcccggcgttgagcaaagttcttctccccatccatatgctcagctgaatcttcccagacctcctgggcaactggttgctgctgcctcctagacttcacgcaaaacctccataccaagtacgagagaatgacgacggccgcgataccaccaatcactccaccagcgatggcaccgacattggtcgacggttgcgagggtctgggagggagcatggctgggtcgagaggctggcagatcatatgagcacattgcttgcatgtctcggggatcatgatgcattcatgtgtcgtctggtcgcaattctctgggcagacgggttgttgtcccttgttgcactgaacacagacttcctggcgcttccatagcgtcgagaaggacatggcggccgtgccatgtgaatcgaacatgtcggccatggtgagcaagaaacctgagacgttcgtgaggcggggtgaggaatatataaaaagggcgatgctgtttggtgtttgggtgacctgttcgttacgctgtgccgatctcgaggatgtgtaacgggccaagcctggaccacttgctcaacgtttatctattccacgcgcgtgaattgttcgtttgtgacccgagagcttatcgtatcagatgaagaaaatcgaaagggtataaggggatggtttgcgtcgtcggtcgggtttcgcactcggcggcgggcgcaagcagagaggacaggatgatgagttgaaacgagtgacgattgagactagctcagtaaagaacggaacacatttggtttgataaaatagaacgaattgaaataatgaatacagagtttcttgacagtgataacaacaagaacaacagcaacagggcgcgtggttgatgttgaagatgggacgccaggaacctcgctgcgaggcaagaaggcggaaggcgggaagggtggaggatttggctgaaggacctggaacttggacctggttcctccctcaatttggccaaggggccagtcaggagggcagagccacactcaggcgccccgcagcggtttagcgaaaacgtcctggagggcgacaccaacgccccattcgctcgatcaaccacgcctggcctggcccctggattccctcttgtggcacggcattagcattacgggagcacacttccatgtttctttttggtacctttccagaacattgatgagcttttcacatcatcatcatcctctctcttttcatctctatcaacaacatcgcaatcaattgcctcactgatggagcatatcggctcttcttgccacagctcaaacgtggcatgaaattcgcttatacctctcgccttcccaaagaggatttccccgcgacaacaatcgctcggtaggtcccactcagcccagcccaccattgccaaggcatgctccaatgtaaatcccttccacccaatcacggaccacgcccaggccagaggtttcaacgcctttttcgaaatcccgaagccatacatacgaatgcatgggttgcagatcaattctgaatttgcatcaatttatggatttccgaccccgcgtttgacgacgacttcgggggaaatgatcaagaagatgtcctatctagatttctagactcaacttgaagtcgtcgctgattggacaaccccccttcctaccgccaagccacagtttcttttcttaacaacacccatcaaatagttcctgcagacctgcggtggtggtgtggtgctgttattgctgaccttaccatggaaggtccaacaccaattgagcaagttccaacaacgggcaaccaaccaccgtcattacactaccatagccgtgccatatttttccagctttgtatgtctcgggtgtatattactcagctgcaaaacctcacgagccgaacaagcaatgttatgtgcgggagctatagaaagcatagtctcgggataatgtaccgggcaaatcccggtggtcccagtccccaagaaacccgtgagggtgtttcgggttgtttttgtttctgatgggtatatgtggatatccgatcccgggcatggtggcttgagagacttgacacgagatggggagacggggatatcctatgttgaggtttgaggagttggagacctcaaaccttcatggctgggtatcctttcatgcatgggagctgttgttttggaatgatatcctgacatcaactcttaacaacatgtcgttattcccgaaacgagtccatattgtcatcatcactacaacaagtccagaccccaactgtcatctttcgtatttcatatcccccatagtaacccgcatgagattttcagagatatagtgcttcccattctcgtcttcctgcatagttctaccgctgcgggtgaaaaaaacagggaagggagcactatatcgtcggaaagggaaccgggtgggtgatgttacgctgcatttacatttcccgagtggtcagttggtctgtacacgaaacctgacgtatatcgtcgatgtggattttaggctaaacgcgaatctggggaaatctagaaatctagatgtgctgctggcttggaatgcagttgatataaagctgactgtctgtttccctggcggtggcgagcaaggtgatgtcttgtctgatagtgcggatgcatgtcagtcatcgttgagcgtcttcgagccacagctcacctcaactccagggttgcagagagccgcagtttgaattcccgtcaaagattaggttcgacagtgtcgagtccaagttcacggacctatcgtgaccggagcaatccgagagtcagggccaaccggtagcgttgacggcgcatatgtcgagcgttgggatgaggtgacagacatggcgcagccgaattacaaatgctcggtgatcgaccggacctataggatagactgagccttagcagcaccactcggatcatcacctgtgctgagcaccgaagcacttgctaccatccgaaagctcccctgacggctcagaccgtgaactaatacggtgcaattgtaaggcttttgaagaccagactgtggcttgagagacctttggaccctgaacccttcagcgggaatggcttaagccttgcgaaccgcagtcaggcatctatatgtatgattgggttggctgacagacccaaactgaacctcaccacatggaaaaggatttccctgtgaatgttggtagaaggatgactgacaacgcagcaatcatgtccggagtttgcagtgcatggcagtgttctgttggtcggtgagcgcttgcacaacaacatcattcgacagagagattctgtgcatccccctcggactcgaaggcgcttataagatcttgtgagacgagcctcgacgaatgcaacctctgacagagctgaagcgagagagattgaaataaaatgtcgaaacaaaataacaatggccttcgaggccatcattgcagtgagagatccgacgggatgtcactcccaccggccgcttcagtgagaacgggagatagggtcaccagcggcagagaccagaccggacgacaccagatgagtgggctgatgccattcccacggccgctgggagcccgagagagaaatcatcgttcgcaaagaatgcacagctcgtgtaatcatggcgagggaacccagcgaatctttgtcgtccaaaaacgtttctgaacgaggctgggcgggatccgagcagccggcacctccatcttgcgcttgacgggcagcagtagcgccagctcagcctcactacgcaagcacgccaccacccaacaacaacaactggatacggaatgcttgttgcgtcaaaaagtctccgttttatgactggcggttggcattcgacgatatttctttgaaggaatgatctgggctccggtagggttccgtacatctgagaccctctttgccggcccgatttttttctttacggatcccaagtgttctatttttggccccaagtcgattttttttgtccccatcatggagatccgtgatctgtgtgagatcgaaaaaaaaacaacccaaagacaaccacaggcatgtggcaacctcagttcgtgttggtggatgctagatatcctccgtatggtaggcacatacggagggcatgctgcttgctcgtgagagaaagtttcctatcttgtgcaacgcgtggcaagcggcgagacgtgggtttccgtgatgtcgtgcgagagaaaagcaacagcaaaaaaaggagaggagagatttcaatattccgtttgtccctctgtaatcccaaataaagttggaccccagcggccccctgatgttgcagccgcgtcgattgccaagagaaaccgtttggaagactgaaccctttttttacctcaaacgttctggacgagaaagcgggaattgacagctatctgaaagctttcctcggtctattattttgtccagatatacgtgtttgcaactgggaataccgtgtgccagttggtgccagtccgaagacgttccagactgacgagatcagaaaggatgggcgttgtggagggcatgatggacgtcatgcattcgctgagcgggtgagctgtttcaggcctcaggggatgagtacccataggaacaaaacaagctcgacacgctcgattcttatcaaggaacagatgctttgatcgatcaactgtattggatatcacgaatgctcgataaaatgacaatgaggccgtgatacctcacaatgaacagaccccagtgctgaggaagaaacgaagaccctgaaaatggaaggctaggccatgctggctggtttggcgatctggagttaaacggcaccaacgcacagtacccgcggctgcggtccagactgtgcgaagaacgctccccaaactggagcactcactgcccagtcgccgtggaaactcaaaatgatgaatgcaactaccaagtagttgcagatgggtatgtacacagaagctgtcatgttcctagggtcttcaataggctcaaagaaaagaagaaggtgaacctgcctcgcaacaatgttccttgggccatgaaacactcctgagatggcaaacgagatgtgagtgccgggacaaggtgacagctgcttggcactcagggggccgcctggcagaagagaaagacggcgacgacagcactgacgtcggtctcttccagcgttcgttcgtgtgggcgggctgtgggcggtgggcaactgatgaacctggaactggaacgggtcgaaagcgagccagtcaccagtgagcagctcgcagtcgcagccatccctggctagcaaagaaggcggtggagcaccctcgcccatccctgtcgctcagccacaggcccccttcaccaacttcataacagggccgccgtctcctgagagctgttgaatcaggtttttgagacctctctcttgacatttgtatttttttttcctttctcttttctcctctctggagacgattcctagaatatcactgctgttgctgccaccagctgagcagcaaacagcgaaaacattgtcttgtcctgtgccactcggtcaccggcgcttccccttcctgccgtgccctggaattgggtatcagaacgactcgtaacggcagctgacgtttcgcactgcaactgcgccaagcttcaccgtctctttttctttgaccgacctgacaaccaacaaccaaacaacctcgacctaacatcgcgatcccctacgaacagtcccccccgacgatccagcgacctttgagaatcttgcaaaatacccagaatattccaatctttgagggaatcttgatttcagctatttctcgcaaaagcgagccgcgactccatcatggcgtaccacggcgctggtggccgtggagacggctatgaagaccacccgttgcagaacctcggcggtccccatggacaggtaagccaccaaaccatactgtggaggatggcaggcggggtgctttgttgctaatatctgaatgaattggcagaacgacgatgaagtccaggcctctctcctcaacgacaaccaggcctacgacaacagtcgtttgggcgccggaactcctccagttcgtccagtctcggcatacagcttgaccgagtcgtacacacccaatgccggcactacgcgggctggcatcggtgttcagcccactccccctccccacggatacaccaatgagtatgccggtgccccccagtacggagtgtcggccaatggtggattcggcgatcaacaatatggaaactctgggcactctgtcgccgagaccgatgatagctggattcaacgccaaaatcccaacgctgccccagctggtggcctgaagcgctatgctaccagaaaggtcaagctcgttcagggttccgttctgagcatcgactaccccgtgcccagtgccatcagaaatgctgttcagcccaagtacagagacgtcgagggccagaatgaggagtttttcaagatgcgctacactgcggccacttgcgatcccaacgacttcactctcaagaatggttacgatttgcgccctcgcatgtacaaccggcacaccgagctccttattgccattacctactacaacgaagacaaggttctcctctcgagaacactccacggcgtcatgcagaatatcagggacatagtgaacctgaagaagtcgtcgttctggaaccggggtggccctgcctggcaaaagattgtagtctgcttggttttcgatggtatcgagaaggtcgacaagaacgttcttgacgtgcttgccactatcggtgtataccaggatggtgtggtgaagaaggatgttgacggaaacaataccgttgcccacatcttcgagtacaccacccagctctccgtcacgccaaaccagcagctcatccggccaacggacgacagcccggctacccttccaccagtgcagttcatcttctgcctgaagcagcaaaacagcaaaaagattaactcgcatcgctggcttttcaacgcctttggtcgcatcttgaacccagaggtgtgcatcttgcttgatgctggtaccaagcccagtcccaagtcgttgctcgctctctgggagggcttctacaacgacaaggatcttggcggtgcctgcggtgagattcacgcaatgttaggtgggtcttatcaattttacgtatgcatttcccatgatgaatagctaaccatcgcttgtaggcaagggcggaaagaagctactcaaccctctggtcgctgtccagaacttcgagtacaagatttccaacattctggacaagcccctcgaatctgcgttcggttacgtcagtgtgctgccaggtgctttctcggcctaccgcttcagagccatcatgggccgacctttagaacagtacttccacggtgatcacaccctgtccaagcagctcggcaagaagggtatcgagggcatgaacatcttcaaaaagaacatgttcttggccgaagatcgtatcttgtgtttcgagctggtcgccaaggctggccaaaagtggcatctgagctacatcaaggcggccaagggggagacggatgtgcctgaaggtgctcccgaattcatctcgcagcgtcgtcgctggctcaacggttccttcgctgccagtttgtactcgttgatgcatttcggacgcatgtacaagtctggccacaacattgtccgcatgttcttcttccacattcagctcatctacaacgtcctcaacgtcatcttcacctggttctcgctctcttcgtactatctcacgaccaccgtcatcatggatctcgtcggtactccagtgcctgcatctaacacatcggcgctccaccacgcttggccatttggcgataccgtcacacctatattcaacgcggttttacagtatctctacctggcattcgtcattctgcagtttattctggctctgggtaacaggccaaagggttccaagtggacgtacattacgtcttacgtgctctttgccatgatccaggcctacatcatcatcctctcggtttatctcgtcgttcaggctttcaagattccgcttgcggaccagatcaaactggacaatgcgtctaacgcgatggagtccttgtttggtggtacgggggcggctggtgtcattctcgtggccctgattaccatttacggtctttacttcttggcatccttcatgtacctcgatccctggcacatgttccactcgttcccctactacatgctgctcatgtcaacctacatcaacattctgatggtgtatgccttcaacaactggcacgatgtgtcgtggggtaccaagggttcagacaagaacgacgcgctgccgtcggcccaggtcaccaagggcgagaaggacgaagtgttggttgaagagatcgagaagccgcaggaagatatcgatcagatgtttgagcagactgtcaggagagctcttgcgccgtacaaggtggaagaggcgcccgaaaccaaggagctggaggactcttacaagtctttcagaacgagtctggtggtgatgtggctattttcgaactgtttcttggctgtggttattaccagcgagaactttgactcgtcttttggcgctggggtatgtttacagtcttttgtcctgttgataatgagattccaaaatgctaactttggtgacagcggaatgccaccgccagaaccgcctggtttttcaagttcctcctgttcgctactgccggtctgtccatcgtccgtttcatcggtttctgttggttcctcggcaggaccggtatcatgtgctgctttgcccggcgttgaagcgtttgtctttttcgtggtttttctgcgagcgcgggcgcggagtactttcagggcggtgcctgtacgaatatggtcacattttcaggcccttgttctgactctcacaacttccctccttatcctttaactattcatctctggaaagattggttttggctcggggcaactggagtgggtgggggaaagagggtaaggaaaaaataattcacgtcatcaactttatgaagcgcggatatcatggagaagagaaaaatatgaagggtattttgtgtgttttaattgttgtagctcaagggggggggggggagcaagggaatttgttaataaaaaacttttatttatttttgtttttgtttttctataatctgttctaattcttataaaattaaaaaaacgtatataataacatggatatttatcgctatattnnnnnnnnnnnnnnnnnnnnnnnnnnnnnnnnnnnnnnnnnnnnnnnnnnnnnnnnnnnnnnnnnnnnnnnnnnnnnnnnnnnnnnnnnnnnnnnnnnnnnnnnnnnnnnnnnnnnnnnnnnnnnnnnnnnnnnnnnnnnnnnnnnnnnnnnnnnnnnnnnnnnnnnnnnnnnnnnnnnnnnnnnnnnnnnnnnnnnnnnnnnnnnnnnnnnnnnnnnnnnnnnnnnnnnnnnnnnnnnnnnnnnnnnnnnnnnnnnnnnnnnnnnnnnnnnnnnnnnnnnnnnnnnnnnnnnnnnnnnnnnnnnnnnnnnnnnnnnnnnnnnnnnnnnnnnnnnnnnnnnnnnnnnnnnnnnnnnnnnnnnnnnnnnnnnnnnnnnnnnnnnnnnnnnnnnnnnnnnnnnnnnnnnnnnnnnnnnnnnnnnnnnnnnnnnnnnnnnnnnnnnnnnnnnnnnnnnnnnnnnnnnnnnnnnnnnnnnnnnnnnnnnnnnnnnnnnnnnnnnnnnnnnnnnnnnnnnnnnnnnnnnnnnnnnnnnnnnnnnnnnnnnnnnnnnnnnnnnnnnnnnnnnnnnnnnnnnnnnnnnnnnnnnnnnnnnnnnnnnnnnnnnnnnnnnnnnnnnnnnnnnnnnnnnnnnnnnnnnnnnnnnnnnnnnnnnnnnnnnnnnnnnnnnnnnnnnnnnnnnnnnnnnnnnnnnnnnnnnnnnnnnnnnnnnnnnnnnnnnnnnnnnnnnnnnnnnnnnnnnnnnnnnnnnnnnnnnnnnnnnnnnnnnnngaggtgtgagtgaggtggggccccacattgggaccaaccccacattgttaacggaggtcggtcggggagcctaaagagtgcccaaagggaaggaacggttgtgggcgtctttcaggttaatctgatgggagggagaagatagagctaggcagcaggggtatagctaagcaattaactgttgggagcaaaatgttgccgcctccctccctcgtagtggtttgaggagaggataggaagaaaagaatccccacctttttcttccatcctgattacgaaggcggtaaggttgaggcaaggcggtgggtgatccgtgtgcctgggaccttgggtttctgcccctccatttgccaacggagcaaggtaggttcctggccaacctaaaacctattacccgtagaaagtaacaaaaagttgtcttaaaacttatttacctacctgaagttgcttttctgcctgtgcggcctgctgctgccggagtttattcaatctgcgcaaaagtgataacgaatactaaaccgactgttaacgcgaaggacggacacgaagcacgcgacctacgcccgttcccccccacctttccgaaccgaggccagagacagttagagagagagggcaagaagagtaatcaagatgttgaagatatggtcgatggtatgtcgcatgcatgggctggggggagaaagtggggaagggttcgatgctgatgatggtgtgaaacctcgaacagaaaaaggagcagcaaaaggctgagaactccgatggtgctgccgctggtgctgctggagggccaaagaagaagaaggttactgcggcgcaattgcgtgtgcagaagggtatgtgtttctcttcctcgaccacgaccagcaaaagatactgacctcttcttgtctgttgtgtgctccagacctcagcgaactctccctcggcacaacgatgcgaaccgacttccccgacccggacaacatcctctcgtttattctgtatatcgagcccgacgagggcatgtacaagggcggccggttctccttcacgttcaacatcacgcccaactttccgcatgagccccccaaggtgcagtgccgggagaagatttannnnnnnnnnnnnnnnnnnnnnnnnnnnnnnnnnnnnnnnnnnnnnnnnnnnnnnnnnnnnnnnnnnnnnnnnnnnnnnnnnnnnnnnnnnnnnnnnnnnnnnnnnnnnnnnnnnnnnnnnnnnnnnnnnnnnnnnnnnnnnnnnnnnnnnnnnnnnnnnnnnnnnnnnnnnnnnnnnnnnnnnnnnnnnnnnnnnnnnnnnnnnnnnnnnnnnnnnnnnnnnnnnnnnnnnnnnnnnnnnnnnnnnnnnnnnnnnnnnnnnnnnnnnnnnnnnnnnnnnnnnnnnnnnnnnnnnnnnnnnnnnnnnnnnnnnnnnnnnnnnnnnnnnnnnnnnnnnnnnnnnnnnnnnnnnnnnnnnnnnnnnnnnnnnnnnnnnnnnnnnnnnnnnnnnnnnnnnnnnnnnnnnnnnnnnnnnnnnnnnnnnnnnnnnnnnnnnnnnnnnnnnnnnnnnnnnnnnnnnnnnnnnnnnnnnnnnnnnnnnnnnnnnnnnnnnnnnnnnnnnnnnnnnnnnnnnnnnnnnnnnnnnnnnnnnnnnnnnnnnnnnnnnnnnnnnnnnnnnnnnnnnnnnnnnnnnnnnnnnnnnnnnnnnnnnnnnnnnnnnnnnnnnnnnnnnnnnnnnnnnnnnnnnnnnnnnnnnnnnnnnnnnnnnnnnnnnnnnnnnnnnnnnnnnnnnnnnnnnnnnnnnnnnnnnnnnnnnnnnnnnnnnnnnnnnnnnnnnnnnnnnnnnnnnnnnnnnnnnnnnnnnnnnnnnnnnnnnnnnnnnnnnnnnnnnnnnnnnnnnnnnnnnnnnnnnnnnnnnnnnnnnnnnnnnnnnnnnnnnnnnnnnnnnnnnnnnnnnnnnnnnnnnnnnnnnnnnnnnnnnnnnnnnnnnnnnnnnnnnnnnnnnnnnnnnnnnnnnnnnnnnnnnnnnnnnnnnnnnnnnnnnnnnnnnnnnnnnnnnnnnnnnnnnnnnnnnnnnnnnnnnnnnnnnnnnnnnnnnnnnnnnnnnnnnnnnnnnnnnnnnnnnnnnnnnnnnnnnnnnnnnnnnnnnnnnnnnnnnnnnnnnnnnnnnnnnnnnnnnnnnnnnnnnnnnnnnnnnnnnnnnnnnnnnnnnnnnnnnnnnnnnnnnnnnnnnnnnnnnnnnnnnnnnnnnnnnnnnnnnnnnnnnnnnnnnnnnnnnnnnnnnnnnnnnnnnnnnnnnnnnnnnnnnnnnnnnnnnnnnnnnnnnnnnnnnnnnnnnnnnnnnnnnnnnnnnnnnnnnnnnnnnnnnnnnnnnnnnnnnnnnnnnnnnnnnnnnnnnnnnnnnnnnnnnnnnnnnnnnnnnnnnnnnnnnnnnnnnnnnnnnnnnnnnnnnnnnnnnnnnnnnnnnnnnnnnnnnnnnnnnnnnnnnnnnnnnnnnnnnnnnnnnnnnnnnnnnnnnnnnnnnnnnnnnnnnnnnnnnnnnnnnnnnnnnnnnnnnnnnnnnnnnnnnnnnnnnnnnnnnnnnnnnnnnnnnnnnnnnnnnnnnnnnnnnnnnnnnnnnnnnnnnnnnnnnnnnnnnnnnnnnnnnnnnnnnnnnnnnnnnnnnnnnnnnnnnnnnnnnnnnnnnnnnnnnnnnnnnnnnnnnnnnnnnnnnnnnnnnnnnnnnnnnnnnnnnnnnnnnnnnnnnnnnnnnnnnnnnnnnnnnnnnnnnnnnnnnnnnnnnnnnnnnnnnnnnnnnnnnnnnnnnnnnnnnnnnnnnnnnnnnnnnnnnnnnnnnnnnnnnnnnnncaccctggccaatcagatcggggccataacccaccctcaagcacgccagtccccccgaagtcggtctggacggccgctggcagggcagcagggagaccgaaaaataaaaaactctgactcgcagctccggtgactgtgtgtttgccaggtggacgtttcgacggtgaacctcctacataatcaacagctctcccctctctctccccaagcttcggaacttggaaccttctttttttccaaacccaatccccactcccctcctcaaccaccagaccagaccagagtcaacatgtctgccgccagaaacctccaaaaggccctgcgccctctggctcgccaggtgacctcccccgccgtccagagacgcaccttcgttgccgccgccggtgctgtccgcgctgctgccgtctcccgcgccgctgcccccgttgctaagcagcagacccgcggtgtcaagaccatcgactttgccggtcacaaggaggatgtctacgagcgtgccgactggcccgttgagaagctccaggtatgttttaatccgactcttttcgaccaattgggattcaactgggtcctgattggtcctttttagagaggcatttatagctaacttgagtgaccattcccacaggactacttcaagaacgacactctcgctctcatcggctacggctctcagggtcacggccagggtctcaacctccgtgacaacggcatcaacgtcatcattggtgtccgcaaggatggcaagtcgtggaaggatgccattcaggacggctgggttcccggcaagaacctcttcgaggtcgacgaggccatctccaagggtaccatcatcatgaacctgctctcggatgccgctcagtccgagacctggcctcacatcaagccccagatcaccaagggcaaggtaagctcatccctgttttgtgggctccgtggagaacaacgtcatgctgacatagctgcccttagactctctacttctcccacggtttctcccccgtgttcaaggatctcaccaaggtcgaggtccccactgacgtcgacgtcatcctctgcgcccccaagggttccggccgcaccgtccgctcccttttcaaggagggccgtggcatcaactcctccttcgccgtctaccaggatgtgaccggcaaggccaaggagaaggccatcgccatgggtgttgccattggctccggctacctctacgagaccaccttcgagaaggaggtctactctgacctctacggtgagcgcggctgcctcatgggtggtatccacggcatgttcctcgcccagtacgaggttctccgtgagcgcggccactcccccagcgaggctttcaacgagaccgttgaggaggctacccagtccctctaccccctcattggtgcctacggcatggactggatgttcgacgcctgctccaccaccgcccgccgcggtgccattgactggactcccaagttcaaggacgccctcaagcccgtcttcaacaacctctacgactcggtcaaggacggctccgagaccaagcgctccctcgagtacaactcccagcccgactaccgtgagaagtacgagaaggagctcgaggagatccgcaacctcgagatctggcgcgccggcaaggccgtccgtgccctccgccccgagaacaccaagtaaggtgtttgaaggagtgttgtggtgttgatggtggtggtggtgggttgattggtttcatggtcaagccccacccccccggttttgtggtgttatgttttagagtaaagaaggaaaaaattaagtaataataagtatttgagtaagtaaaatgtataaggtaatggtaaattagtagagggaatgaggtgtaatgagtgggnnnnnnnnnnnnnnnnnnnnnnnnnnnnnnnnnnnnnnnnnnnnnnnnnnnnnnnnnagattgtgggcatgatgatgtaggctgggatggaggaggttttggcggctagagagagggcttgggcgtggttgcctgggggggggggggttaggtaagtgatggggtgagggagggggttagtgtaaatacctgatgagtgagttaccacaccgcgggaggggtcaaagtcgggggattgctttaggcgttcgatggcgtggaaagcaccgcgggccttgaaggcaccgatgcgttggaagttttcgcatttgaaatggatgcggaggatggggttggagggggtttggccggaccactctgtgttggagagggattcgggggtttggggggtggaggcgagggtgttgatgtaggttgaggtgaggacgggggtctggtggatgaagggtttgatgagtttgtgagcttcttggacggaggccaaggtgagggtttcgggggaagacattgtgatggtgtgtttgagcccgggccgggagtggatcggggttcggatccggatcgcggggtagttttggtgtaaagtgtaagttgacagcacacacgactggtgattagcaagttttatgtgcaatgagtttggtatggcagtgagacgttcaaattgagttttaaaggtaaagaatcctagcccatgatagctccacctgtcttagccctgctgttgacatttgacattctcgccttcctaatcgaggttgacatggcgggctggccgggtgaggggttgattagctgaggagttgctatggcccgataacggagcaccgcaacggtccgaaccggtcagaggaagcgttttcaccgtcaaagcccgttaagagcaccccgaccacgggagataacggccggaatttctccggccgtttcgatcgggcgtcttgggaaaaaaatggggagggaggccggctgaggccggttatggccggagatgggtggagctcgtttgttgctgttacatagctagtgcatagtcgacaccactgcatgggttgctttcttccacttcattcggatgcaagggtgacgacaggagtatagggtgagtttctcttatcttttcggctggtcatggtgagggcgcatgaactgtattttggtgtgtttggactgacttgcacgaccataggcgtgcaccagtgacgttgaggttagtgctggtggttatcttgcttgatattgcgagcttaggaacatacaatatactgattcgaaccattatttctttgtcgagatcccgctgccagacacgatggccgggccagcaaggtgacagtctcgtggtctcctcatggctttccatgacaaagagaaatcggtctgtcggatatcaaccatccgggggagttgctagttcgcatagacggtcaagatgtgaccagggcgaggccggaatagattccggccatggtgtatataggcgagcaacttggccattcttcaggaccaaatcaacagcttctatctcaacttcaaacatcttcccgatacttcgaaccctcaaagattcttgacctcaagacacaatgggttccctatccaaccccgtcacccccttcaacgtcctcacagacgccaaaccagacgacacctccctcccagccttcatggtgtccaccacccgcggcttcctcccccgtgccgaccccatcgtcactctaccccccgagtttgaccctctggagtcgatccttcagcgtatgcccgtcaagacggcctctggtgagcctggcctcctagccgagggcaagctgggcaatgtcgtcctgtccgagctcccagacttgacctcccacatcgacaagtacgcccccaacctccccttgatgaacgccctgtaccgagactactccttcctcttgtccgccttcctcctcgaaccctgccacctccgcttcatcaaaggcgaaccctacggcctagcccgtgatgtcctcccagccaacattgcccgcccaatcaagcgctgtgccgaattgtatgacacccccagtcccccttccctcttatcactgttgctaaccctcctgccacaaaaagaacgggcttcaaacccttcatggaatacgccggctcctacgccctctacaactaccgcctcgccaaccccccctctggcctctcctaccccaacctccgcctcatccgcgcgttcgagcacgggctcgacccctcctcctccgaggcaggcttcgtgctcgtgcacatcgccatggtctcccactcccctctgctagtctcaggctgcgtcaacgccttatcgtccgctacctcccgcgacaggagcaggttcaacaccgccctcggggaggagatgttgaccgcgttgcgcaacatcaacaggtcgatggagacgatgtggcaaaagtccaaaccggggagttacacctcgtttcggaccttcatctttgggatcacctcgcagagcatgtttccccacggggtgctgtacgaggggatagaggagtacaaaggggagagacagagtttcaggggggagtcgggggcgaacgatagtatgattccactgatggatagtttgttgagtattccgatgccggagacgccgttgacggagatattgaaggattttaggcagtacaggccgtcgaatcaccgggattttatcaagtatgtagctgagaggcaggatgagttggggatcaagcgatgggctttgggcggggaggagaaggaggaggaggggagggagacaaggaggctttggttgaggctgttggatcaggtgagggagtttaggtggcggcattggtgttttgctagggagtatatcctcaagcagacttcgcatcctactgctacgggggggagtccgattgtgacttggttgcctaatcagttgggtgctgtgttggctgagatggagaagatttatggggagggatggtgggagggggaagctgggggaggagatcgagaagggattatggacctctggtgggtgccaggcagagggagatgtctgcccgagacagtgcaggtgaggaagttttgcctgaggataggggtgttaactaggttagagtaatcgtggcatcggtatggcgtttgtgagtaaataatgcaatatcgagatttgtactccccttagaccaatgctatgctttctacttgccctctctttcaacaaatcgcaaacagttccaacgccaactccattaataccccctactcatgccacccataccattacattatcatgatccattcctgtcactttaaaccagatcccatcccccccccctccccccaattcaaaaagccataaccatcccagccaccccaaccaaagctcccacaaacgccccctcatacctcacagcagcccccgtccccggcaaagccttcgcaaccccagccgtctcccccgctctcacaagcgtacagctcgccgtcccacaaccatacccatcaggacagcacccctcactttcatccctctcattgcacatgaaccacccattagcacactcatcccccatcacaggcggcgcaccagtcggcatcggcaccgcaatcgtcaccccattgccatcaaccaccgtcgtcgaggaagtcaaaggcgggcaatcagtctcggcgcaaccccgacctatctgacaacaccccccctcgttattcgcacgagcaagacaagcataataccccgtgggacaaaatcccggttcacccgttgtagacgtctccggggcgtcatcagacgtagttgtcgatgactggggtcgagttgacgtcgtttccggagtagaactcgactctgaagtagttgttgttggttgcctccagcggagccgaggtcgtggttgtagttgggatgggaacaggaagtggaacactattcccctcctatgacacctacagtttttcatatcagtcacaccatcccaaccaaaaatctcatgtcaagatgggcacttacaacccaacccgccgcaaacccaccccttcaaacaacaccctcccccaacctcactcgggcacccaacccccccctccccgcaactcgtcacgccccctgtgcactgggtgttatccgggcagcaacccaccggccccaagccagtatccgggattttgatgcatgtcgacccttcgtggcagcaggtgttggggtagccgatgttgctgcataatagggtgtctgtcggacaggaccactgtcttttgcttactcccagcacccctcgtcgttgtgggttgggggatgcgggtggaggagggttgtagactgcgcggaggggggcggagaaggaggttccatctctcgggaggaggaccgcagcagaagagttggaaggggatgtttgggaggggtcgaaggcgcaaaagtgggagtggaatttgagggaggggttgttggggggcatttttcggatggcggttggttgttggagcggggtttgttgttcggcgagggagaggtgggcggatattaaggcccagagcgggagggggagggggcgcattgtggtggtggtggtggtgagtgaggttgtctgtgatctggggagggagcggtgttgcgaattgaattgaattgcggtgtagcgtcgggtgcacaagaggggttaccgtcgcgcgggcacagcgggggtaattcaacagagaaaaatgtgtcaacaataaatcatgcaagaacctcaaccctgggagagccgtctgtatcgccagaggaggcgtggtcgtgattgtaaatgttcagctgtcgcaagtcgcatgcgcaaacagctatgttgacattctgtgggtccggctcttttggtcgagaacaccgcgacaacgcaacggtcaaggggggcgctgcttatcgttgcttggcgtacacgttggctggagctaaactgtgagaaggggtcaatgacgtctggacagacaaccagatgaaagtcggtgagtggatctcctgtaagatctgagccaaaaattaagaatagaaaacagggtgaacaacaacatcaacaactggaaaagctcagtaccacaaactctcgggaaccccctgcatcaccccacccgaccatcggaaccccccacgtccaatcatcccaactcggcagtttgtttacatgtcccctaaattgcttcaacgtttatacattttagattgagggtatctaccacaggtgcacatccatagtcttacacaacatccccccccttatccaaactttttaaatctcaaacagcgtctccttcgtgacctcctcaccatcctcctccgctgcctccttcttcaacacagccttctgcatccccttcaaaaacgaggcacacagcaacgcccccgccacattgacattcaaactatccaccacgctctgtcccgccatggaagggatattcaactcgtaatccgccttcttgaccaccagcctgtctaacccctcaccttcactccccagcaacaaaacacacggcgttctcttcaacgggtccgtcttctcaatatcaaacaaatcaacctgtcttctttgtcttgtagcacccggctcctgagcaacagcagcataaacctcccagccgttcgccctcgaagcattgaggaactcgggcagagaattaatcccaaaaatggtcacctcctccgccgcaccagccgatgccttcaacgcgacaggcgtgatttttgtcccaccatagtttgtaatcgccacagcagccgcgccaaagaacccgacactgcgcagaatagcacctaggttgacagggtcaagaattctgtcaagcaccacaaccaaaggtttgtgcgtagcgctcttgcgccagtagacaaagtcattcgtgccattgatagcaacgtcctcagccgactgatggcccaactcgaccgaaaacccaggcttagccgcgtactcagccgggtcctcgggaatggcgcctaaggccacgatcggtggctgagggagagcagacgcttcaagaacaaacccgttgtggggacgggaagaagacatcttgctcatgagacgcatgccatacttcccggagacgacctcgacagggacgctcttttgctttgcgagggtgcggatgactttctcggctttgatgtcatctgcgttctgggattcgcggacgtcgtcgccttgttggatgtagagcttgtagagcttgcggcggccggagcggagggcggcttcgacggaggaggagccgtagaggaactgggaggcggcggtggtgtaggtgatgccgatgggctcggggcgctcgtaggcatcactgtcgtggaaggggtcgtccttgtattctcttggggggcggtcgttgaagtctctcggggcgcggtccttgaactctcttggaggtctatcgccgaagtctcttgggggtctgtccccaaaatctctggaggagcgctctttgaactctcttggaggcctgtcaccaaagttcctggggggtctgtccccaaaagctctggaggagcgctctttgaactctcttggaggaaagaccctctgaggcacatcgccgaagcttctcgatggcctgttaccgttacgagacggcctgtcaccaaagctcttgccccgtctatccccgtcacgactccccctgtcaaactttctgtccctcgacccgaagctcctttcttcccggtcacgagaaggagcagtcttagcataacccccaaaaggcctctctctccccttgttcgacctcttatcctgcccccaaggattcataccctcctcccccctcatcatagaagcaaaacccctagaatccaacggctttgatgccgaagacctctccctatcccggcgagaaggacggacatccctccctctctcacctcttgaattggtaaaagcatcaccgtcggcagaacccatccccatttcccgtttcagctgtttgacctcttcggccaattgtccagtcttgaacttgtagaccaaacttttcttgccatggctgtcctcggggtcaaagaagcgggcttgcttggacttgggtctggccttgtctgggtactcggtgatgtcctttcttcccttgcggattttgtagtcggggcgttgggctttgagttcatcacggagcttttgacgctcggcgtaggtgtggccgtcatttttgaacttgccggattgaagggtggttgagacggagaaggcccttgaggaaggggtgatgagtgagatgaccgagggagatgaggtggttattgacggtctggtggcacggtaggccagttggagagccatgacggctcgggaaagtgtgaagaagtgaaactgaatgtatgtatgtttgctgagtgaagcctcactttttgagtctcaaggatgccaagagatgtgtacaagagagatgcacttgaggtgtcttgtgtgtttcaatgcgaagaaaagggttacaagcctcaacctgaaccacaatctaaaatgtacaaacgcacaagacgaactcagcccccaaaatgagagaaaatgaatgcttttgagactatgtttgctccttcctcgaagaagatccaggccttcagatgcagaaaaagtcgggaaggtgccaagcccaggacccagcggccccaccacagctgccgggcagccaaccaaagtattcaggacattatatttcaatttaatccctggaaagccttaatccatttaagcaaacgcgtgtttttggtccgtcgcgtgaaaggcggcgcccctccacttcccatgctttgagactgtctctctgttaaccataacccccctcaccccgattctcagcttgtgcaattttcagtaaacagcttggcattggtatgcggccacagctttttgttttctgtcatctcaactgacttgcttctccaagagtagcttccccaaacttgcttacatttggagacctttcgaactcgacattttggcacagcaaaccagcacgcaccccccttcgacttattgttgatgtactgccgaccatggccaccaacggtcttttgagctcagatgatgagctgttttttgatcccatgccgacagaagaacccacgacctatgagtttcagtccgaactgtcagacgatgaggatccagatccgattgcggtcgacgagattacccagcctgttgcgccttcggtaccgtcacatttgatgcctgcgatgcctcgtgcgaatatggacgactttttgcccgacgactccatacagtatgaggaaccaccggtaacggatggacatggttatgacggacatcgaagcgatagagacgactcggccggtccagtcacaagaatcgtcgacattgaagtagcgttaccggagatgtcggaggaaaagaaggccgagtttgagtacattgaggtgccagagatgaagccagaaactgagggctacatgacaaggaggacacgcaatggggtaaggggttgtgctgggtgatttgctgtttgtgtctgctgtggtgggagatatgagcaaggctcaacgatgcaagtgcgtcaacatcatgggagttgcgttgtgctgtgttaggttgtggcgtttgtctaaggagttgtagttggcaactcttccaagtggttgagtggaagctgggacgacaaccacaagggcctcaggggtcggggggtgggtggagttgccatcaaagtatcaagtcccaacatggagagcaagttgctctgtcgggatgtaatgcaatcccgggctcctgatccaaactcttttgggtttgtctttagtatggagccaggggtttttggggagcttgagttgtgcggtcttggtgcctacagtatcgctagcctcgctgttctggcttcaaacatggtcagcatcctcttcctagcccacatgacgacctccagctttcggtatctcccgagccgaagacttgtctggcttcttttctgccttcacccatcgctccttctccacctaaggattttggctgggtcacacaactactgtcaatgaccttcccctattgatcacaatattgctccttcccaacacaccttcgtctgaacccttagcgccttttcattatttgcaggtcacacggttttgttatccatctatttctccgtttggtttgattcgccgtcttcctcttcccgagaacctcaactttctcgctgctgctcgcctcccaagcttctgaaaacgcccattctcgccggtttgttccttccaatggggtcttccagtcactcagacggcgagtatactccgcctttcgatgacgagaatagcggggatgacggggctctgctcagcctgactgccgaggccagcaacggcaggcaattgtcacctgacgactactatattgacgaggttgagtatattgacccagaggaagccgactggaatattcaatcaggcaacaacctgtcaaccagcgactttgaccgcgactatttgaacaattttcacccggcctacctggatgagcaccagccagagcacagaaatttcgttcagtcacagcagatgaccatggatcgcgtcaaccaggaatccgaccacgcctacgaaggcgatagcgactatgcctctgatcaggcctctgagtacaaggacagcgactacgactctgaccccatggatattgaccagattgacagcgacgccggcagtgactctgtaagcgcaggcagccagattggcggaattgggcgaccagagtcaagtgactcaatctctgcactgcattcacttattcatttacttgttgcaaaactctctattttccgcatttctctttttcactccaatcaatgcccattgttctttcttgccggcaaattgttgacccatactttataggactattacgatgacttcagaaagcgcaagagaggttataacgataactactctggtgccgttgacgatttcgacgaggcctctgacgacgacatcccccgcacccgaggtgcccccaccatgcttccgcctgtcaactttggcagatctctgcgcaagcgtgctgaagtcaccaattactatggcggtcaagatgaattgcaggaggatgatgaggattcattcattgtcacctctgatattgtgcgacccggccgaaagaagttgaagcgcttgtcttcgaggctttctgccaggaccatacagaagaccacgtctgtctctgcctctgcgggtgactctgacatagaatttgagagcagccgccgccgttcatcccgtgccaacaagaacaccagaaagatggtcgacaagtacgccgaggacgaggatgacgaggatgatgaagccttctacatctcggacaacaaacctgctgctgcccccaaagtcgccagcgtgaaggagatctttcagggcaacattcccaccgacttcaaggaagctcacaggttgacctgcgacagttgtggctatcctgatgaccgcaacaagggaacctttgtcttttgtcaaggctgctccaatgtctatcacaaagtctgtctgggcaaccgcagcagccgtgagcagtgtgtgaccaaggttgggccagattccttcgtcatgcagtgccgcttttgcatcgatgtttacaagaagcgagacccgcgggcaccaagccacggcacatgccaaacttgccatgtcagaggcccatcatgcatccctttctccgaaaagaaaacacccaagcaagaggagaagttgcgcatcgataatggcggtgttgatcccatcacggaggtcaatcccaagcttatcaacaaccacaacaacgtcctctttcgctgtgccaggtgccatcgaggctggcactatgaacatctcccccatcccaacccgactcgagacccgtcttggtcagagcctctcaatctacgcaagctcaggttggaagagtaccagatcgattggatgtgcaaggactgtcgcgacacagatgggctcaagcctgacaagattgtggcctggcgcccagctgatcgcaagagctacatcgaaggtcagactatcgcagacttcgacgaggatcaaatcgagtacctgatcaagtgggagcgccagtcttacaaccattgccagtggttccctggcgcctgggtctatggtatcgtcaaacacaacatgcgtgtctccttcctcaagaggacatttggagaggggcttgagggaggtcctgacagcgagatcaaggcagattctctgctcagatggaccgaaaaggaggccatctacaatgtctgggtcacacctgatatcattctcgatgtccacgtcgctccgcgaaccgtcgaggctgaagcaaagtacaaggctcggtctcgcgaggacaagttccaggaggacttgagtcggatcttccacgtggtcaaaatccttgtgaagtttgagggccttgggtacgaggatgttgtttgggacacccctccggactcgtcagacggtgctctctgggaggcgtatcaagaggcgtaccgggagtacctcaatggcaagcacttcaaaccagagtccaaccgtgtcatgcgagagcgcctccaagaattccgccaactcgatttcgtcaaagatatcgaactcaagaagcagcccgagggcctcaagcgcggccagcttatggaatatcagatcaatggcgtcaactggatgcttcacaacttccgtcatgacaggagtgtcattcttgccgatgagatgggtctgggcaagacagttcaaatcgtggcactgctctacactctcatcatgaccaagcctcgcatctggccgtttcttgttgtggtgccaaatgcgacctgcgccaactggcgacgtgagatcaagaaatgggctcctgaccttcgagttgttgcatactatggcggacgagtgtctcaacaggccgcaaaggagtacgagctgtttccaggcaatactcgcgacatgaaggcacacgttgtcatcatgtcctacgactcggtcaaggacagtgaaacgcgatcccggttcagcagtgtgaagtgggctggtctaattgtcgacgaagctcaggctctcaagaatgacgagaattcgctgtacaaggccttgaacatgctcaatatcccgttcaaggttcttctgacaggaacgccattgcaaaacaacaagagggagttattcaacctccttcagttcatcgaccccagtatgaaggccgagcagcttgaccaagagtacgaccagatcacctcggaaaacctcaggcatcttcatgatctgatccggccgtatttcttgcgccgcacaaaggccgaggtgctcaccttcctgccgacgatggctcagatcattgtccctgtttcgatgtcggtcttgcaagagaggctctgcaagtcgatcatggagaagaaccctcagctcatccgatccatctttgctcagggaaaactgaaggccaacgagcgtgggtcgctgagcaacatcctcatgcaactgcgcaagtgtctctgccatcctttcatctacagccaggccatcgaagatcgcaacctgtctcccgagctcactcgccggaacttgattgaggcctcttccaagctgatgctcttggagattatgctgcccaagttgaaagagcgcggccaccgcgtcctcatcttcagtcagttccttgaccagctgacggtcctcgaggactttttgatgagtttgaacctcagacacgagcgtttggacggcagtcagtctagtttggagaagcagaagaagatcgacgcatacaacgctccagattcagacatcttctgcatgttgttgtcgacgcgcgctggtggtgttggtatcaacttggcgacggccgacaccgtcatcatcctcgaccccgactggaaccctcaccaagatatccaggctctttcacgcgcccatcgtatcggacagcgcaagaaggtcttgtgcttccagctcgtcactgttgactcggccgaggagaagattcttcagatcggtcgcaagaaaatggcgctcgatcatctgctcatcgagaccatggacaatcaggacgacgcccccaatgacgtcgagtcggtcttgaagcacggcgctgaagctctctttggcgataagaagaaggatgccatcaaatacgattcggctgctgttgacaagcttttagatcgatccatgcaggaggaaaccaagaccgacgataagaaatcggccgagtctgcttttgcctacgcccgagtgtgggccaacgatggtcttgctgacgagatgaaggagaccgaacagcaggagatgtcgctcagtgtctgggaccaaattctcaagcagcgtgaagaggaggctcgtcgtgaggccgagaaagctagggaaactctcggccgcggtggacgccgtcgtggggtgagtagttatgcttccagtccctggaagcccagaatactaacgaacaacagaatgccaactacgcaggtccccagttcgagtttgacgagggagagaagccagacagtgatcaaggcgaaggtgatcatgacttcatcgctaaaagcgatggtggtgatacaagcgacgaggaagtcggcactccagccactgggctatcagcacacttgcgcaagtcaggtacgaaaagtcaactttctttagttcagtcaagaagcagagccaaaggcaacaaagggggcgcgacaccaccagtcacgcccagcaagaggaagaccctgcaaaagaccactcaaacacgcagtattactcgaaccacaagctcacgcaagacaacttctcagacaacgaaagcggccaggcccagacccaaagcaacgcccaagcccaagggaaagcagcagcagcaggagcagcagcttccctcgccccccaaaacggccacgccaaaggcgccgtcaatggtgataaagttaaacgttcccaagtcgaagtcgccatcttcacggcccaaggcccaggcgcccaacaacaaaacagcggtggcgccagcaacagtcgcccagttagcacagacgtccggtttaatgtccctgacaatgctgcgtcccaaaaccaaagacggcagcagcagcagcagcagctcggagctgtcggaggtgtcgggggagccccagtaactcaccaccaggcaggtgcaagcatgacagcctctcaaagggcggggattgacttgttgaactcgattgcgatgaggcctgctgggcagtctggaggtggtgggggtgggggggtgatggttaaccagattggtgtgccgacggttccgagctcgacgtcgtcgtcggtggcggcggcggcggtggtgctgccaaaggcggagcagtgcgttgtttgcaagtatagtcacccgtggagctgggagtgccctgagatgaggagcatgaggaatttgagggtagcgttggatgagctgaagcgggatgggaggttgacggaggaggagaggagtgggtggagggggtttttggtggagaagttgaggttgttgagggggtgatcttggggcttactcataatttttgaggattgttgtgtgttgttttcttttgggaaggggagtgctagtcaaacggggagacaaaatggtgatggggaggggctggctggtgattcattgcgaaagagagggggtgctctggcaggatctctaagctcttttcattcagaagagagggattatctcctttttaatactctgcggttgagttttctattgcatagcgcgatataccctgggattttttccggtgcattgaggcattcggatggaggtggggaggcgtctggggtttgcttttgcgcgccacgcagcatcatacagagagattttttatttacaaagacagggattgcgtttgtgcttgctacctacctatgtgatgcgctcaagagtgactgtttacctatgtttgtgtgatgttgcccacactggtttgtttctatgagaaggggaggggtgttggccttgttcgggtgggctgctatggggaggggagagttagggaagggagaattggggaggagagagtcggaggggagagagttggggaggagggtgggcgacttgacatggtccaggcggttgtggagggggccggggggaaacttgggatggtatggaagggaaatagcaaggtggctagattttaagtgttttgggatagaaagtgagacgagaggaggaggtacagtgcgggcatgtgatgatcgagattgggatggaagtcaagggaatgagagaagtcgagacggggcagtggttgggtcactgggacagaagattcaaggtcgggttgggcaacatgacatctttgtgacgtgctcgaggtgggcgagcaagatgcctacctcctcaatggccaactccaggtgcaaggcacggggctggagggttggtagtgtgacatctacactctcggtgagagctcgggggagctcgctggcaaggatgtgggagggagtggttgggatggcagtgcttcatggttaggatctggggctgatgtccagaatcgcgggagaggggtagaggaggagttacagccagaccaaactggaggaagggcgatcgacagtctagatctgaggggggtgtcggaccgatgatgtgagtggtatgcgggtagatgggagggtttcccaaagcacactgcgcctccgtatggaggttgcttttgggtctggcaggtttgtttcagatgatagcttactttgttagatttgggttttgggggtggcaaggctggtgagatgagatgacgcctttaggccggctgagaggtggccgagggtttcaggaagaggggtgggttgttcgttaccggtctgtcgggaggggaatgactcgcggtcggagggggaatagggaggttgggatgcgagttgcaggggaaaactggagagaagcggagttgtaaaacgatgagattggtggtgcgctagctacacacgatggatccaatgggttggtggtatgtacctagtttattgctagaatgggaatggatggtgagggttgtggctggcattggtgttaacattgacatttgacagctgacgggttgacgtgcgtagcggcccgttgaatggactgagcttagcctcttctagaaatgagggacatgagaaagagttgtggtattttctgtgttttagagctgcccaaaggctttgtttatttattggctttggagatctgttgtaagtggcaggatgcttaggggttgatatggctccattgggatacccaccaactttgacactggacgtaaagaaccctttctggatggtgtgtgacctttggagatttggaagtatatagggcaaagacgagatgttgggatcaactgtcagtacttgtcatccgatgtcttggaatacacgtggtaacttcaacatgtataatcttggtattgacttgatgctgttattctttttgtggatctagccacatcttgcaagtgacaagtacctacctaagccctgggagtaaataacaattcaatgtctgtccggtaagtgctcacaggcactggtgtttggcgtgtggagtgctatgtgagcggaggttggcgccacttctcaccacgatgctggaaaagtatcttgatcaatgagatgatattctcccaatccctgaagccgtactacccatcccatccatcagccagctcccgccgtgtagccgccctgaacacagatatctcaccaaggatcacaacacacatgcactaaatacctttttggtaccttccggtatcttttctcccatttgcggtcggagtggccgtttgtcacgtgcgactagtgaaccaaaaagaacaggcaccaaatgtggcttcccgcccagtgcctgggcaaaggcaagcaaccttattcagattgactgtgaggccgtttgcttcaagcttgttcaagtccttttggtctgtccggcatttgtttacatgcattgatatgagtcaacggggagatgtctgctcgttccgataggttggcaagttgctttctgaagtgttgaggctcatgcattccacaagcccaccacaagcttatgtggcttgtctgttcgtttggttgcggtggaggagaggttagcaacggaaaacaccgatcaagcgtggattagggcgccagactaaggtagtaagaaccagaaagataaataacgggacagatatctatgtggctgtttaggttctttcgcctcttttctaatgctggctgttacgctgtcaatcggtagcaagtaaataccttacctaacttagatatcaacactaagatattttccaagtgcatctgctgttttgccttgcaactttcatcttcaaccctggtcccttgtccctcgtcccttcctgccctctgccggagacgcacaacaggcaggcgcacaacacctcaaagctacggtcgtacttgcttgtgatctgctcaactggctacacctgccagctaggtagatacgagggctcccagtcacctagctccagcaccatcagcggcatcagccttgttttaactgacactgtccgctggcccaccggtgtgccgttccacgaggcctcactcattcttgtcctcgctctattgttaccgcacgcctcgttaccattctcagctctattttccggccaaggataccagtcctgctgtcaacagtgctaacctgcatatactttctatagaggaggttcacggcggtataaacacgacaacccaagtcgaccaggctttcccccagctgtctcaactgattggactgcgactatatcattccgtttgcacgcacccaccacgcacatcctgttgcctctctctctctctctctctctctctctctctcgcctcccgggggggcagtgccggcattgtttccttttggatttgatttgatcagtgtgtgctgtctccgccatttgtttttgttctgtactgtttcctttgacttcccgagcttctctgctttttccatgtacacgcctttggctgatgcgaaagcagggttctccgtcaacgcaatgtctggtggtaacctgcatcaacagcagcctgactgcaagcagcctaggcctcattggttcgctggggagctttcatcgccttccgtggcatcttctggccgctctctgtcattgaccagtcttgagtccgtttcttctcttgatagtgtgtcagaatcggccttgaagacaccaacagcaccggcaaactggcgtgctgattccaacgagacaaaagaagctgcaggcacgaccgaccaagtagtaaataagccaggcaggcgtcacaactttcgtcagggctcttcatcttctctgttcaccagttctggtgctgcgactccgacatcgtctcatcgcatcccttcggtagtgaacccaacttctcagaacgcgggtattcatgcgccaaaaccctctgttgaaaggggacgacacgaagaagaccctgctggcagttgcggagcacgcgatcctgactgttttgattcggttagtggtgttgggtcaaggctcgacactgatggtgaacaaggccacagaggtacatacccctcttgcacacatgttcctgatgcagcttactgacctgtaactgcagctcacgagttctcttttgttgacgataacagcctgaaggcatcttcagggcttgtatcacctagcttttccctccaagctggatacaggagaaagtattcacatgagcgtgacagaaaagcccatattttgcagcagtttgagagtatcagaggtgtttggccgtcggattctgtaactggttggtgtaccctgcttctaaacgacgacgccagtatgcctgactgatgatcatagctgcgtcgcacaatacaagcggatccagcctccttttcaaagctcccatcgcaaagaacatcgccgagatcaaatctaagctcgcgttcgctgggcttcttgcctcaacggccctttctcagccagcagacaggcacaactacaccaccccccgtcctccttccccgagtatcggctcggacactacaataagggcggctccgcatcagctgaccacgtattccggccaatcaatagaggtcacatcaccagcaatacaaacaacaggcagtgccccgaacacctccgagccattgtcctccgttccggacccactttccgaaggcataaatatctccttcgggcagctcccgaacttgaactcagattcctctttttcttttgatgagcagcaacaacagcaacagcaacagcaacagcaacagcaacagcaacagcaacagcaacagcaacagcaacaaaaatcgtccaagcatcttgaaaaagaagaaatgtctggctccgtcgcgggtagcgttggcgctggcgagcagatgcgtctgtctggtggtttgagtggaagagggcagcttgctgccagcactgccggcccctttggtggtcgcgcgagaggtacgtttttttttccattcatctgtgttagtaggtgtgttttggaattcatatactttctcttttctcttttttcttttgcttttcttttccttttcttttcttttgctttttgcgttgtctctgctatggttgttgcaccggttgaatttgtcttcactggtagaaacacaagctctaacatgcttccaggcattgacaactggcgccagcgagcgcagtccccgccccagcccaggaccggcaatggtatatatctattcagcctcaatcatctgagccaagctgatcagtatatagatacaacctcttctccttctctgggcgcggtccttgctcccgccaatggcaactttgctgctggcccctcccaggggtacaaccctggcttctcttcgcctgttgcgccgcgctctcccaccttggcgtctttttcttctgccccgacccgccccgccgtcctgtcccctgctgcccggcagcagttcactcctttccccggcccatccgccgtcaccggcatcttttcgcctggcactccgaccatctctgccggtctcagttttggtgactttgccggtggctccggcttctcgcccgtcggcttctctggtgctgccagctttgtcgacccgtctggtttcgcctctctgtcgctctctgaccccgcggccgcccgccaaggccagctcgcccatctgcgaatgatgggtgatgctgggactggcaatcttttctcgcccccgacatcccagccccgggggctgtacggagtcccttcgtcttctgccggtggtggtggctcggccacgaccccaaccacgaccgctcccccggcgatccccgccccgcgcccccagaactgggatctggctcagtaccagagccagtatctggtcaccatcggccctgatacccagggatactgttttgtccgccctgacggcagccggacccgactggtgcccgttgacatgctcccattctcgctcgttgggcttccgccttcggagaacgacaatgacaagctgattgagttggtgattcccaccggtatggaccgactctgcaagaatagcaatattgagcgggcggttgttcaggtacgttccattctagtgtttatttacttgccccttttcttgttgggtgggtgacgggtgatggtctgtgcactcagccctcaacccccaccaaccctagcccgtcactgctctctttctcctgcctgatgctgactttgtgaacagtccccccctaatcgccatcaagaccccatccaggtaagcagttttcctctctttttcctcataatcacctggagatctctcccgcccatccagcccaatccaactgagactcgtatcagaaccgtattgaccatatcctgctcgcgtctgatcctcaggcttcttctgctgccgccactaccggttccggtccgacttccccttctgccgcacagcctagaaagatcaaggtctattgcgacaagtgggttcacgagggcacctgcgcgttcactcaacaaggatgcaagtacaagcacgagatgcctatggacaaggccacacagcacagtttggggctgtttcatggtttgcctacctggtggaagaagaggcaggcagagctgtctcgcgagagcgagcggggtcctctggagcgcggtgggggtgtttccgttggtggaaggtttgctacgggcggttctggtggcgtcaccggcactggcgctggcgccggtgctggtgctgaaggtggtcacagacgatatggttcgagctggtcgcgctgggacagtgggagtggtggaagtggtgtggggagcgcatctggtatgcgccgcggttcttcttctactgggagtgagtctggtttccattctaccaactggagagagcgtaacccggccccggggtaatgagcagatggtgtggtttctttttgttgctggcctaatctgaaggtggtgcggttggcgttttcgtttgcttatataaagaagaataccccgcggtatagtatataccccaagcggtttgagagcgttgaaggggtgtgggcgattgggcgggatgtgattaggtgtctgcgagtgcagttgtagttgtgtactgaccgagtgaataatgtggtttttgggatgtttgtgtcgctggtgaagtttcatcagtgtgtggagattgtggagggggtacaaccgcacgacaacccgaaaatacgacttcgtcaacggcctttacgaccaagtaatcctccaactgcttgtcacaattttgcgccctgcatcgactaccgtctctgtgatccttcttcaacatctcaatttgcttgactggtattatggacatcataccctcgcaacaccaagagtccaccgtcttcgacattcatggagacattcgactgccggatgtcttctgatctcctcaagaccgcgagaaatattcgccagcctgatgtttcaatcgttagttaccaagtcgacttttacttcccagcggaaagcatggtcaaacctgcttggaaagagcaactttgtggaagatcgcagttcgccagactttttgtcaatggaatgagaagtctttgtcacagctctttacacaaatcaaaatttctgtccccttcttttctggggtattattagggacgcgattatcggagaggcaacacaaagtttatcactggagattactttctctcgtcacctctacactatctaagcttcgaccgtctcagtctagacgagcttttggttagttgttggacatctcgacgaccacatcctcccatcgctataacaacactatcaagatcacgacgaagatgaacacgttctggggtgggctagtcatggtcctggctgtccgatccccgagaggcatgttccagttcaactttggcatgtgtttgtcacggatagctgaggtggtttatttgtctgttattattgcgtctaaggtgacggtgggcttggttgcctcggtttaatccgcccaagtgggcggtttgatggatttgtggctttgatttcgtttttgttttttggagtacgagtgtactatttatcacaacgcacacacctcggtcacttttaagacccaaagctaacttggctatagaccacccgcctcccaactttggtcctgtcggctcagagagacgccctgggcctatccgccacggcgaggtcaatgatgaggattcggagaggaattcggttgtgagtgaggggaggagtgttacgggtatgatgattattagtcctggtagggcttgatggatatgagaacaagaaatagggcgatgatttgatgacgataaaatgggtttggaattgcatggaaacaaggatcagtatggaatatgttcagaaaatatgggttatggatgatggattacggggaaatgttttgtgggtttttgttgtcgttttctttttgcttatattttctatcttggaagcattaaatagctttgtgctcacgcatgggaatagtttgggagatgtgtatgttagggtagttgacatagagtttaagttctctgattttgtgaggttttggccattggggtgaggtgtgttgtggtgtggcgtggtgtggtgaaggtgactctggagtgtgtggtgaaggtgactttgagatgtgtggagttttgaaggtatgtcgtggataaggcattcaacaggatccgtgctgttttggctgcccgcttcacagcgacatgaaaaagaacagcccaaagttggattaactcacccgttgttgacttggacacatccactttgggagacaagaagcacccataaatcttataatttgagtcttcgacgtcctgtatccatttactgacgaccaccgtattccggcagctctttccatgacatataatatctatcaacagatagccagtgtaagtgagtcgcaaaaactgtgacgtgatctgtcctacgtgaagacagtctctactatcgaacctaaaaaccaccaagtcaaacgccccttccccccctcccaaccaagtgtcatctcctatacccaccccgcatacgggctcactcttattgtacgatcccacctttgaccgcataagcccccctctgcccttctgcacagctaggatgtcgtgctaacatcagttatcaatatcttttctccctcgctcgcctcgacgcacttccttgtttcgagatcccaacataatctcaacggacggagacttgacgagagttgaaccggctggctccccgcactcctcgaggtactgtacaccccttcctctgttgcgctgctgtcccgctatcaacagccgaggagaaagaggggagcatcgcttgctctcgctcctcgagcgtactgtacactctcttttctccttcctcctcttatgttccctccagctaccgcgtcgtgacccagctaccgctcgcgggcgctgctgctttccaccataagaggaggagggcgggaggagagcttcgacgtggtggacaagggggaagggaggggaaaatcaaggaggagggtcgagcggggggctgctggggacaggtcggtcatcgtggtgaatgatggccatggtttggcagagggcaagtgtcggaaaacttgtagcggtcgtagttgtagtcgatggctgccagggttcccttgatggcatactaggccgtggtgggtgtttatatcggaaggttctgtgggacaggcggacggcccgacggcttcagcagtgtttcgagagggagtggagtagttgtagttgtcgtgaacgagggacggcacggctggaatgggtgatggaggggtgggttggtgcgagtgctgtggttgtgatgtgtctatgatggtgggtgggtggttaaaatgggtgggaatagtcgagtgagtgattgacggtgagatgggtgtagaagtggaagatgggtacaaaagtggaagtcgggtgcagaaatgggagcgaggtggcatgagtcgaagatcacgaagtgctcaacgaccaagcattagcaattaaagtctacaaacacgaccaacaccacaaataaacaaggacagaccaatcaagagccccaacaacactgacccaccccccaacaccccccagacacaactcatgaccaacccaaccccccctccaacccttcatatagaatgtccgcattcttcctcccaaccgaagcaagttgaccctcggcgtggtcaagtggtcagattgtggtaggttaggatagtttctcacacccagggcgtggtcttggggcacagtgagttcgatccaaactcgggcaaaaaccccgtgggggtttttccggacgaggtaaattgcccccagcgtggttggggttcaaagcagttggtcgtctctttttttgacattttatccattctatctgattcacttatctataaaaaagtgcaagagaagccactaaatcgtgtgctttgttcggtaagtgaggtgttgctatggtggtgggagagcaactttgcctgctgcttgaggttttgactgtccatcacaattttcacagttcgcacacaaataagacggagagcaacaaggaattacattgggcattttttgaccgaggttatcatggccagtaacctgttcaagagtactttttatcaaggtggttgctgctcaaggtcgtccagatggagttggcgactttctgctttattatgaccgggcactttaccaatctcctgccatttctcatagaatcagttgataaacatgctatctaatgctacacagtgctcatcatctgattaaggagcactttcgactagaaagctattgctttaggtggtcgaatggatatcgcgacttccttcttttatttattagcacacatcaaacccactcctgttattgattatcaacctatctaattaatatactgcctgcagctgcaaggtgttgttggtctggtcaagaggcacattcttccatgatgcttgctgcttgaagttgttgacatgcatactacgactttcgacctcattcttcactaatcacaatgtttccgtttaaattcacgattaatagcataattccacttgaaaatagagtccataatctcttgctattgctatcctcaaaccttacccataaccagctgtcttctaaagcagcctacacataccctctccaacgccattgctcaaaaactatgcttcatccccttccaaaatcatttcaccaggcttctagccggccacaatccccgtcatcaaatcctcatcctccaccacatccccaaaacccgtcacatccaccggccccccaccctgactctgcccttgctgctcatgcttcttctgctgcgccaaccacttcaggtaatccttgttacttgccaacctctcattcgtagccttgaccaccggccccagcgccttgatcctctgcgcagtcgccaccatcctcctcgtgaactcttcctcgctcaagtcatccgccgtagagctaaacgccaaatacgccaggccattctctgggtgcaccacctccccttgcaggaggccctcgtcaatcattccctggaccaacgcctcgatctcctgcaccgatcccaagggcgcagccgtctcggcggattgtgttcgagtccgtatttgctcgagagagattctggagtagacatgtctcaaattcaaaatctgccacttctgatagtgctcaatcaccagcttcagaagagaaacattcttctcctcgtcccagaaaccctgagacagcccttcgtattccgtcttgaaagattccgctgttcgcttctcaaatgcctgcgccaacgagtagtatggtttgcccgtaacctcgtagacttttcgtggcccgtttggcgtggtaggtgggagaacaggtgcctttccgttgagcaagagtccaaccaaaacccacttgctataggcttccacttgaattttgctcgcgttggtgttgtctctggatggataggtaatcacccgctcaaaggcatcgaaagcttgctgccaggatcgtctctgaataaagcaaagcccgcgcaggaggtcatgctcgaggatgtctttgttctccaaggatttggtgaagtcgttttcgacagtaataaaacccgagggaggaagatcgggatcgctaagatttcgagtgcttgtcgagcccttcatgccagggtagaacacgatgctcttctcgatgatgggcaacacaggctcgatgttgttggtcatgtaggcaaatcggacgaggtaggtatggtggctagtgagaaccgacccggtgggatcgaggcggagaagcgctgtggtgatgagttcgaccgcaatggaagcctaagaccgtcataatcagcaggcgacagctacagaatcagcagcaagaacctacaggaaacaaatcctgcagccgtggctgtgttaacagctttgtgaacgcatgcccagcatatcgaatctggccggcgtcgaatgatgtgaggaaggtggtgagctttagcaacaggtcgtcgagagggtagccattcgacgatttcaaggtctgcagcacatagaggtaggatagagaatgggtagctggatcgagtcgctaatttcatgttagcaacatcagatctattgcccagatctgcaaaaacaggcatacctcaatgagctggggagcttccgaagcccacttggagtcggccgacaacctcgtcaatgtcttcgtgtgtgcttgcgccgccttgtggtattcctcattatccccaagctgccccgccgacgggaaagccacaagcgtcgcgagtgttgattccatcggattaatatgtagcactttctgaatgggacagtcggtcggccgtggtgctgatgggatggacgctttcgatgaggacggcgatggacgaacgacccctcctagctgtggtctccccaatttcgctcttgtatgggtgtctcgagtggcgtcaaaggccagcaaactgcggccaagttgtagctgaaaggaaggtcgtgttaaaacagctcgatatcggcgcgggttgttgtcagtggttcagcgctccagattccagacgtcaaggtagggttgggttaagctccccgccattgaacattgacgtggggaaggtgcctagctcagctccaccaccggcaaggctgcaggggtatgacacagtgcgctcctcgtcattctaggcaactctgcactgtgagtaaccattgtggtgctcccgggtccagtcaaaaaaagatgtaaagcatggagctatgaaatcgggatggtatttgcaattgcaccaatacatggtcactctacagaataggccaacatgaacaacaggcaaatccctctctaatacatattaacctccccgtcgcctcgcttcaacgtccactgaacaacactacacacccagctgcctgatcatctctgccaaccggttgccttccatcttgtaatccaatggcgtcgcctccataagctgatagcgcaccctagagccacagttagcacatgcaaaagcaacttcagatcatgcggagcagacctaccgttgctgttcaccatacgtatccatcttggcccgagcccggaacgtcatcttcctgcagtttgcactatcaaacgcagtggtaaatcgaacctccgcctccttcctggcctcatctgaagcatcacctgactccttgatctgcttccactccatgagctcatctgccgacgcgcccagcaacttcctgccctgctcatcgaagcagctcagccagatctggccagtgtggtcgctgcagttgaagttcaagatgtaccgatactccggcctgtcgtgcgtaacatcgcatttctcgcagcgccaggtgccgtcacccatgtcggtgaccttcttgttgcaaccctcactgcggcacgccgggtagcagaagttgtcctgcttgacgtgaacaatggtggcctgaacggaaaagtattcgggcttgtcaaagccaacatccttctccttcacctgctggatcatcaggatctcgttggtgcgacccgaggcagcaccgactgacgacatgttactatgtgtcgcgaagtcgctgtgcctgccggtagagtcataccagcccttgagagcatgggcctctggaatatcagggtcaatggccatggtgccagatgacaaaagagacaaactcctgccgttgaagtcactgacacgggtgcccttgaacgcaatgacttcctccggcttgccctggaactcggtagctgtcttgccccaaacggtaacacgcaccgagtagccagtttggtccaccagctccaactcacgcttgtcgtatggtttctgagtgctcttggatgtgatcgatgagacctcatgcaccgtcttgagcacaccgagaacatcaaccgtggcgtccttctcaacgctttggagctcttggatgttgcagaagttgaaccgaacctgtggtactgagctctgatcttcagccttctcgacaactgtatcccgctcaaacgtgagctcgtagtcgttgggaaggttgctgaactgcttcttcgcaagctggactctgcagggtgcagagatatagtacacttggccctcctgaagaacatcgtagaattggtcgacctgatcgttgaacatggtggccttgatctcgctgctctcgtccaacaagttgacgctaaaaagctttccttcgccgttgtttttgtgccatgtcttgatgtccgacttgtgggtgagtctcgccttgatcgtccacttgtgagcatagggggatagtgcctcgataggatagatggtactgctgacacctccgctggtgcgagtgttgttgttgtggttgttgttgttggggcgtgacgccagttgtctctggacctgggacttggactcttgggtcggctcgcccttgggggcaccataaaaggcaggcgcagcagcagcagcagcaggttgagcttcttcaagcttcgctcctccttccaagccaacagggtttccaatcttgtccggcgcaccaagggactcgatggcctcgagctctaatactataagaacgctgttcagaagttagcaaacgctgaagggtatgaccgtgggaaacagcggtgacgcacttcttgcccttgagggcctgggcttggtatgacttcatgcgaacgattcctccacgcttgagcttcccctcgtgaacgacatggttggcctgggtggccagcatgcactgcacatagttacggacatcactgaggacgatgcggtatcgttctggcgcaccgccgccttttgagtcgagggtcttgatctggaggcactgcagaaccggaacgggatactgggcacgggcgcgctcaggatcggaaaagatggctctgtttgagttggttaagtcagtatcaaagccttggaccttgaatcgggtacttactctatagcaccttgtgtgatcgcttgctccgccatcttgtgttgctcttgttcgttatcgtgtggttttggcccggtcaaattaggcgttgaaggggtatctgccggtttggaaaacaacaagtctgggatgatgtcgtggagttgggaataattgctggaggggtcgcgttgggtgaccgcgtcttgccaggcagaacgcgtcgaggggcaagagtttaattgcttgaagtttgctggcagtggggccgtgcgttggcgtcggcacagtgtttatttaggcaccagttagctgcactgtcctggaagcttctcctatcttgacatcaggtactgatttgaaggtatcaagctgcagcaacgtgacagtatggagatatcacgtcgaataatcagatatgacccccgtctcttaataggatgataccacttcacaactatcatcccacctgccatacactaaattgtgtagttctcaatgggaagtcaccatccacccagcagctgccactgcagcaagcggggtctctttgcgtgtgcccagccagatgtcggtgagggttgacccgacgttgatcaacaacatcaacatacatctatcatcgtaaacaacaaacagatcatctcatcgacctacacccatctccttttagcccttatcaatcctatccaaaatgtccatccccatcatcgactcccacatccacctctggaacgaagccgaagcccccagtcacaactggtacgcctcagactcgcccctcgcaacccgccactccatcgcagagtaccgtgaagccaccagctcatccgcctctcagctctctggcttcatttacattgaggccgaccgcaaaaatgacgactccaaggactggtcaaaaccattgaatgagctagcttggatgcgtcggatcatcgagggcaagcctcaggagggtgaaggccatactgctgataatgccaagctatgtttgggaatcattccttgggctcctattgcttctggcttgcctaagctgaaggagtacattgctactgtggaggaacaagctggggaggctgcttgggcaaaggtgaaaggtttccggtatttgttgcaggacaagccgaacaagacagggttgacagaggagttcattgatgggttgaagttgctgggggagaagggctgggtatttgatgctggcgtcgaccagcacaggagagggagggtgcagttggaggagctggtggagattattgatcgggctcatgatggtgtgaaagatgaagacaagaaggtggtgttcattatcagtgagttttgaatggggaaggggctggcattgaagaatactaacggagagacagatcatttttgcaagcccgacctgacaatcatcagtcagactgatccgtcatttattgcttggtatgctcattttcttgattcaaatgaatgaccaaatgactgaccagataaataggaggagcgccatgttcacacttggaaagtgccgccgcacttacatgaagctgagtgggctgtttgaagaaatgtcagactcactgaagacacaatctgctgagcaaatcttctcggcgatcctgccctggctcgccgttgttattgctgcatttggcccagagagaatcatgtttggcagcaactggccggtatgcacagttggtgttggtgaggaggcttggaagaagtggcacaagattgtcgacatgatgtgtgatatggcgggtctcagtcaaaaagaccaggctatggtctggagcgggacagcgaagaaggcgtataaccttgagggataggtgaacaaggtgtcttgcaacaggaattacctcactttggactccaagttcccttactcgatttggtgcaacggaatacgcaagagggggttggctgagaggcaagcaaattgttgtagaaaagtgcctttgaagacatactcgagtcaggcggcacatcatgtataggggtggttgttgttacatcggggcgtgaagaggcttccactttggtaaaaagaaggcttaaatcgacgtttggcttggctatgaaaagacaaatccctaggaggagtacacataatcatgcacaccaccagtggctacaacccatctctatgtccaacactagtacacaaaattcctgttcctggccagatcggctcaccaaatccggggatcggttatgacgtctgcgggggaggttcattccccacaattctcgactcttccccaagttcttggcggtgcacgcgcacatctgccatcgctaagccgagccgaggttgatctgggggacctcccagccgagccatcgtcggtggggatcctccagaagacaacaaccacttgtcttgaagggattaacaagcatcttcatctttaaactatacactgcgctctctactctactctctcgatcttcacgacatctgcagtacacttcagttctcctcgaaagatcttcccaagccaaaaccgtcaacatgtctgctcaaatcaccaaggccgaggttgcccagcacaaggacgacaagtccatgtatattatcattgacgacggcgtctatgagattgccagtatgtttcttctttgcggtgacagtacataatgaaagatggtatggctaatcgatttcttctctagactttgtcaacgagcacccaggcggagccaagatcctcaagcgcatggccggcaaggacgcgacgaagcagttctggaagtatcactccaagggcgtcatggagaagtggggagccaagttgaaggtgggcacgctgaaggaggaggccaagctttaaataacggttggatggatgatgggtggaaaggaggagggagcgaatgatggataccatgaccgaccgcgcgcgcgtgtgtgtgtgcgacgatagcgaaacgaatactagcgatgcgaattctttttttcggaatttgaaaatggaatatatattactacaccaacttggaccgcgaggtggcccttcagactggacggtttgtgtgttccggagattgcgcgatcggttgatcgattggtacgatggaaaagcaggaagtatagtgtacttccctccctacatctcgtgacaaccagacagatatcaagtcgatatcacaagcccctccgggtttcttcagctgtcacacacgttacttctgacccccccccccccccatttgggatttctttttttgacccccaacggcaaggtgatgacccccacgagtgtcaatggcaggttgatcggatgtgggcatttgacgaaccccccacctctccacgttcttgaagtacaagttgtcgttgggcctttccatatcccacgtcaaccgcgcgcgtcgtggggaaatggtggaatttccctcatgttacacatcacgatacacagatctctttttctagaaaccgaaggatagtgctgtcatggccaagacaagacgaaatatgggggtttcggcagggaagcttccagcaacacgagaaaaacacgagaatttgttcgagacattttgcgcacacaagactcgctttagaagaggagaaggtttcggaagccgggagatcgaccttgtgtcagtctttcacagaggaaacagctgaagaacagcgggagtttgtgctacggaaggcttttgatgtcactttttaaagacatattttccgcggcgagttccagcatgctttttacctatcttttacattttactcacccgtcctagctattcccgatgtgctcaggatgggaaaagatagggaattcgaaaaatgccgatgaccaagagatgatagaaaaggacccccacgctttctttttttttttcacaccacctgcggcatgcgtcaatgtacaactgatgcaacctgtcggcatcggtcccttcggcgggcttataaagttcacggttgtcggtgaccaaaagaagccttcctgggtccggtacctggtaggtaggtatcttatcggcatcggcgtcgggaaacaaagatgggcatttgacggaccggaggggggtggggagatgttatacttgttctgatcttgtaagagatggaggttctttgaaggggggggggggaggggggtggccgtgtgcggggaggtgggatccgaagatcccgttttatgggagtgtgtagggtacctaaggtaggtagtctacagccgcggccgccgcggtctgcgcatttttcccgatcgatcatactgtacctacattaggtatatgtgaggttaaaagttatgacgctagcggcgcttgaagagggcggtagtgcttgcatgctcgtgtgcggcttacctacagcttgcacttctggtagtttgtctctctaccttatcttgggctgatctgtaggattcatgctgaagggtcgccgtcttgagtcaggttgatgtgctgacaagcggtctaggaataggacgggcatgagatgtgccgagaatggacacagagtaactcggctggtgaggttatcgatatcagagcactacctatctcttcgggggactaagagttgcatggattacggatacgagatacggcgaccgttgaagctattctctttcacccaaggccgtcatgattggaggaggctcgatgttacctccaagacgggccggttgtgagaatctactttaccccggagtgttaattcatcttgggtcttctgttggttgaagaaatcgatggattcaacacaattttgcctccttcacccccgaaaacccttgataggtccatttgaaccgactaccctctggttggctcactcttcaccaacatcaaccattcaactttctacctgcagccccgtcctctgtgatatgcccacagtagacagtcaccgctcaccaaccccacaactcatgttcccttccccgtattttcccccagttccatcaacgacaatcacttgttctgggccctggtctggtttaggtgaagtgctcgtgtaatgtgaacttcctcctcgttggtcaatctaaaagagtccacaaactctcattggtgtctcattttgcaaatttgtccaaccccaggtctgactgaaccttgcctccacttacaccaacagagtgagaactgaagaaagagacccgagtttgccgctcaaccttgttagtgttcttcttcaacagcgcgcacatggacccttttatgcaagatcatcactgtcacctttgttagtgtataggtccatcacaatcacatcacaggtagtcacgatcttctttgacaggttaggtaaggcaggtaggtaaatagtgaagctgcgtttcaattcaactaatccctcttagggaatgatcccccccttccttggtagtaatagtaacaagacagacaacaacaaaaaacaattatccccaatttcagtcgaataatcccatgatccgacctttgataggtatcccgaatgttttaatgatccaactccatgctttgctcacgtgaatagcatttgcttgctttgtgttccccataattcccaaaccacccaaaaaaaacgccgtgtgataagagcagaccggaatggtggtagtgtaagttgttgtgaaagtgaagtattgttgttgttgttgttgtggttgttgttgttggtggtggtgtacaaaaaaagttgtagtaaaaattattccgcatccggtctgctcatcatcatcccatccatgaaatcaagaagccatcaacgccttgtccgaaagatgtagtaaagagagaaggctgtttagcgacggatggacgcgggccagtggtctctgtagccgatgggggatggtgggggggcggccgggacggagtagtcgttttcttggatgtggtggatcggggtcacaagctggttggacttggactggagggtagcgttgaggctggcgaagagctcttgggtggtgatgaggcccagaggctggcgcgcggccgggatggggattggagcggcgatctgagagacaggcattatgcttgtgttgtgtttgtgtttgtgtgtgtgtgtgtgtgtgtgtgtgtatgttggtgaggtgagggttgaagatcttgatggtcaggagtagggtagtatggaggaggtctgatggtcttgatatggcggacttgtttgaaggcaagtgtgttgagacaagcaaagggcaggaagagcgaccaaggcttgggtattaatgtgttttcttggagatatcctgtgttgcttgaggcagtgtaagaaaagaaacagagaaagacagctggggagtcctgagaccaacagactctttatgtagcaggcccggccagggaaaaaaaagcaagagaccagaccgacctggcctctggacagggagcaggggagaaggcagacaggggggccagattgatgagaattctcggggcggcccagtgggaactgtggaattctggggaaggtgggatggctcccacggctccgtggatgtaccttgtactttttcacgacacagaaagcccgaagaaatccaaaaggtccgaggtgtcttgcccgcgagggacgggaacggacatgtcaaccagccagcaacaaaaacagaaaaagcaaacacaaaagaaggagcagagttttcacctccaacctcctctctttcgccgtctgtctgtccgtctgctgtttgtttgttttgctgcttttttccacattcgttgaggtggaatgctttcagcgtgttcaccgtttccttgggtaccctatacagcgacagggctgcgctgtttgggggccaaccccccaatggtgagatcggatgacaaggacaaaagggggctgctgtgcttgccctctctccgagcgttccataccacagccgtcaccaccgaaggcgtcagtgtttgggaaaatgagaggacacgagacagagctagcacactgccgacgacagtctaacgtggtgccaaggaccgggtcttcagcctgtcgtggtcatggtgtttttgcggcctcttcggagcgagtgagagcagcagttgatgcgccctataaaatctctgtggggagccatgttcagagtggggtgcaggccttggaggcaccggaaattccgtctggggtacagcagagagtgtggtacatggatggggaaatgtggggaagacttgtttgactcagctccttttttttctttccactgttgcctcatcctgtccgtgacacgttccatcttccattttccccttgcggcgtgtacgaaccgaccgtgtcagcctgagtgtggtgccacagctcaccgaccattctctttttccatcgctccatggattttcgcggcacctcgctccgacactaacaaatcctgctggccacagattggattggcgcggcttgagcagctggaacttgcaattggatttggatcgcgatcagccgaggacccaagcatgttccgacagttggacagttgggggggcggcgcatgaacatgaactcggtctccacggcggtcgaacctttttgaggtccctcagattacacgacgacgccgcccacgtacctattttctcctttctgtgggtgatgaaggcggcgcaagcaggtcggcaccaacggtaccttgtcagcaagcatccagcacacgcatccgtgggggttatcccttttgatcccccatctgagtcagtttcctctggatcggacacaattccagtggccctctcggaatgtttactctctcacttcatctgatgtcaaaggcatgatgttctcatggatggcttcatgccgttgcactcggccgtttcaagaaggcttctggaactctggaactctggaactttggaacctcggggtgccatttccaaccctgtcaggaaaatcggcgccgtttgccggctagcgaacagtgcttccccgggcgcgtgcttggctcccttggctggagattgccctgaccgcttccccagattttcccgtctcccgggagctgcgccaagagcagcgatcttcccccaacagaagactctattcccacgtcttgtttgatcgccgcgtcgtggatccacgcagagacggcttgtcatttgactttgaccaccttcggctgttctcgacctctgttccgtcaacttcctccggcttcagaaatggatggccatgtgtcacgttttttgcctgtcgaaagcaatcaatatcctcctcacccatccctggtcgatgttgatcaaggggagggggctggggaagaagcaaatgccgtattaaacaacagattgctcatatctgattcttcactttgccgtcaacacagtacaattactgacaattaacagacacattgccttcagccctcgtgactttttgccagaattcggcgtaaatcacccggttttcctcctcgactgccaccgtcacgacaagcctcacaaaaatatctcttcttgcatttatcatatcgcttccgctaccaagcagtacaagttcctggaccttccttctaggtctgccatccgatcgcgtaatcctggcgttccattgcgtccaccgttttttttatgctccgtatatttctccactcaccgcaccaaggtgaagaattcttcaccggtgttacattacaaagttgtattcctttccttcgaaccgagggctcggtgagaaaaaatcaggccgcggatgacggagcgggcggcaggcaaggcagaaagataagcgtttttgttgactttttgccggtaacgacttaacaacaggggtggttgagccgcgggaaaaagatagtggtgccagggggggagtgggaacttcacatggtaacgacaacaggagcaggtttgttgactgtttgaaggacgggaagatgtcgcggcggtgatgtcacttgttttcatcagtctgacagctgttcttttggggagaacaaggccgatacactcctgaccgaggcacagcacttcctcttggctccggcacttgacacaacctgttcctgaccgctcacaccgatgacgatgcgcattatcgccgagtccagaatggcatcgtagggctatgctctgcagcttcgatgcggccatatgattaggccaaatagtgtgggttggttgggtcgggccgaaggcttatggggctttgggagaagatgatgtttcgtttcagatccccaactccaacgactctccaaaaatgaagttggggggattgcggcacagcacccccgatttcaactctagacatgcagaggtcttgatgggagatgcacgccggcacgtataacagaggaagatggccgaaacggagaccaggtagatgccccgcccgggcctgtggccttccgggagtgggatcgggatctgcgtggtgctgtggctgtctgtggaaggtattgaaaggcacgccgacgccgatctgtgagctgcgccgtcggccggtctactgttgatcacttatttacatcccatatgtataccgtatagcctccatgtagataagtttattaacccaaccttttaaactgctgaccctacatttttctgtccacaatcctagccttttctgtctataatccaaacttttattatctgttaacctagctttttgctatccattttcagctcaaattgctgaaaaaaattctgggatatctacaagactcttacgcatgcaatcatctcataagctattaagtattatcacccatactcttttcattttgacgggaactctaggtcggagcaagactaaaaacgtttgccgtagtctggcctttcaatccggttggagatacgacacaaagagtatcacgtatctgaacaccatagccctgcttcatgcttcatgttgttcgagactggtatacttaagagataaaaatagagatctatctgcgcatctattatgtatatagcaaaaaggtcttaatgtctatgtcttcctcctcaaaaagaccataactcactattatcactccaacagttgctaacacacaacagctgctaacacaagcaaagagaagagagcaacccggctattgtcaaggatagataaagagtagttcgcgatccaaattatatccgcagccgcacaccatcccttaccggcctctacctctacacaacccaaataccaccaggcaaaccaaaaccccaagcaccctcccagtccagtccaacccaaccaccacccagtcgaaccacccccccccccccccccccagtcgggaagtatcttcccgggcctggcgcacaatccactcaaccgagaacaattcacgcctgctacctaaccatctaaaacaagagaaaagcaacatgaacaataaaacacccttggtatcctttctccgtgtagaccatcttgcagctatgcccgaaaagaaaccacccccccaaattcctgagctcttaccacgaggttggccgtcccccatcacctttggtcgatttctcgatcatttctacacaacccacaacccgcatgaacgaacaagcaaaagcccaagacagaagcccagccagagttcataccgaatgaatagccggcttgcattaaaaaggaataataaccaggagaacagccaaagggagacggctttctttgacgatcctgaggcttcttccgagtctttcttcagggctatcaagcaaggtaggtaactatcggtatccaaagtgatttggttgggtgttgttgaggccgaggaaaatatcctcaccagtcatcctcgctggaatcttgctctaccatctcgccttcttggtcctccatgtcgctggagtctggattgcccgcgaggctgtcccagtcgtcttcggtgctgtcctcctccccctcctcctcttcctttttctcctcatccttcttcttcttcttctttttcttcttctcccactcctccgccctcttcgcccactcctcccacttcgctcacaatgcctccacctcctcccgcttcttcgcccgcaatgcctccacctccttccattccaccactgtacccgcctccggcttttccatagccgcaaccgactccgggttcgtctccttcgtctccttcttccccacctcgctcagcccagaccccctgtcatttcccagaatgcccatctttctatccccgacatctttcttgttaccatagcctccatacgcaggaaatttagctggtgcagcgaagatgttgggtggaagaccggtggtggaggtgtggctcgacgaggcggcgttcatcttggagttggcggggatgtcatcctttggtaacgcttggtaggtggagggtttgggcatggggcccggtggagagtagaaggtcccagcaggggtaaggctcaaaccagggtactctggtctcggaggggaaaagagtggcggaaggctacggccttgaccgtgttccttggtcgaggggtcatgaggcatgggttgcaggcgagggatggtggtagaggtgttgggttcatcttgttcctgttgcgcaaaggtgtcgggcctcacagaggatacctgagggttgttgttgggtccgttctggattggtgcgcgataaatattggatcctgacgggatgccggggtagcgtgttgatctggagccaaggaaagggctcgctcccggcaaggaggagggggttgttgttgagaaaaggccgggtgtgcagaagggcttcctgacggcgggctgcgtcgcccgaagactagtggcgctaaataagccatgcatctcggtgtagtgctccctatggatgagcttgttaataggatcaaggttaatagggggaggacaagacatacttgatagtcacatctgtacagaccttgtggcagaaagaaccagtaacggggggcaatctctgcttctgtgctttagaagtggtttcgtccacccctacactcacgccactgtctgcgggtggcttggagagcaagaaagtagcacccgttggcttcggattgcgatcgctctttctctggcgctcacatgcactgctcatgtttgttagaaagtacagcttgagtgagaaccataagagaagacataccaaggctggagaaacggaaacggaacgggtttgggacaccatcgacatgtcgggacctctttcacagtcttctcctccccctttcccccaacagccgccaaaacagccgtctttgaacccctcaactcctgaagctgaacctccctctcccgaccaaccacatccttcaccctcacagccatgtcctcaataaaatcgccagacctgtcatgaatgtacttctgcatcgcacccatatcctcatccaaccgctcctccacctccttctggtgcttttccatcctcatggaaaagtcgtctctcaaagtctgcaagtcaccgttgtgcatccgcctgatgtcagcaacactcctgttcaacagatgaaacctctcgttgatatcatcgaatctatccatcatacggtcaaattcatcaagcgtgagctcgccctgagatcgagcctccatgtcagcaagccggttggtgatctcgtcgagcttggccatgatttgggtgttggttatagtttctgttgctggggagggttggggaaacaggagcttggtgaggtcgtgaaggcggttggcttgtgtttgtgggccatcattgatggttgtctcctgacctacccagaggccgcggagggtgttggccaagtcggcggcagcgtcgttgatgcgatcgagggggttggtctcggtggtgctgtctctcatgtcgagcaagaagctgccaagagcattgatcttgtcgccgaggaggtccaggagcttatactcagaggcggcgagctggttgtccgggttgttcgaggcttgattcgcatcggtaacagaagcctgaacaacagggcgaggcagctgggcctcattgtggggagcatcatgcatcgtggcagtatgtttcggggtcttgactgttgctgaagtagactgagtagtctcgtccttacgagcacacttagtatagtgaccacggcccatgatagctgggagtatttcaagtgtcggacgtagtgatggaaaagagaagaggagtgatgaaagagggaagagtagtgatgaaaaaaggcagagtgggaagcagaaaagggcacgatggagaagagttttatacccgagtcttgaaactgaacaacaagttaaacctaaatcgtttttaactttccaacactcgaaaaaattccagtcacacaacccagttccacaaacccgtcatcaacgccattaaagtgaaaaaagaaaccttgatgaaatcaacccctgccgtggtgtttatggtctccgcctgctgagtaggtttcccgtaagtgtcctcttgcgcgtgtttcgttgtgccagccccattcaattcttgcactgtctcttcatattctagtgctagtaatgtataatgtggttcatgccggtatgcaccctgctcccataagagaacgagctactcatcaatacaggccatccttttatggcatacctcatcctcattgaactcatcatccccagggctcatcacataccctttctccccccgcacttctcttgattcacctggtcgattcatgcctgaacacatctcaaggcctgctccgactgttgttggtaatcctgagattcctcatccatgctatcgcaggtttgctgcagtcgggatatgttgttccacgtggatcgactttgagagggattctggctcaggtttaggttggtcatggcgttccgtttgctattttatatatatattatatcgtgacggttgtggctgcgtgttgtgttcgcagtttggcaagcctcatgatatggagcttgtggtgttgagcgagatgggggaacaagagcgggatggcgagctgtgactcgtaatcttgtcgttttggacacttggcactcacaagccgccagccataagcaggtagttgtcagacttatcatgtgctaataacaagctggaagtcacactggacttgaaaaccttcgcatggaaagccactgacgataaggaaaagtctattgaccaatctctccactcctgccccatttacgtctgggagcagcaagcaggtgccattgcttgccctttccaatctgttcatacaattgaaatgtcatcttttcatagaggcacagagcagcccagagtgtgaggacggtggcgatttcgaggagggccattggcttttgtggccttgcgttctgttgtcaaagtttgttgggtcgagattgattgctactcgaggatgatacacgacaagaacgaagagacgatatgtttgaagataaagcgaactatttctcccaagtttatatacacctctgtccaagggcgcctgagaagctttccatcacccatctaactgtacatctcgatttgtctaccaatataatgtatgtataaaagccaaatatttccccaacgccacgcaatgctcagttgtcaaaaaccaaaaaccaaaattgtgtctgcatcatccaaccaacagccaaacaccccatccaagcaccaggccgaggcccaaccccctctctactccctgaactcgcctgaacccagcactggtgctcccacagcaaggtctcttgacaaaggtcacgttgttcatccttgctgctacctcgaagacactccctgggtagtcaccgtagttgtaataatccacattcaggacgtttggtggccgggtccactgatcccggcagttcgccgctgccatgcccaaactgcctttccctgacgctgcgttggtggtattcaacgcactaaccgccggcaccaagattgactgccccagcaacgacacctcggcgttgaggttgtgattcatgagatacaatctgttcttggcctgatcctctggcagatctggtgggcgctgaacggtacatgggaaggtatcgtcaagtggatcgaagggcgtttcccacatggccgagaactcgtcttgtagccagggataggcagtggcgttggcattgtaatccaggaacatgaccaccctctgccccgtcaaaatcatctgggccagcgttggccagtcctccagcgccattggaatgaccggaggtgtgtagatgtattgtagaattccgctacgctcgatccaggggacgtataagtctgggttcgagtagttgccatttcctaacaggatggtgacgacatcgtaaggatgggcagacacccattctcgaaccttgcctaaccagtccgtgatagggccagcgtcgaacagatcgcaggaggtatggcagaagtgtggctgggtgccgttgactgggaactgaatctgcccctggaggaacctaattccatcgttgagctgatcggtgacattatactgctggttggcagcggccgagccggcacgaacgaagggcgagttgtggcaccctacttcggtgatgttgctgtatttgcgctcgcatagctcggggtaattgttgcacggccgagtgttcgtcggtcgtggtggggtggatactgtcgaggatgcagtgccgttcgtggaggtggtagcaacagaagacgtgaccgagcctgtaagggtggttacaagatctgtctcggtatagtttgctgtcagaacccccaacgaagtaggaagagaggtcgtcgcaagcgtgatcttggaggagaaggtttggtaggttccggtgggcgtagcaccgttgagcgggatagtgccgctttttgtaccagtcaggtaggtaatggcctcttcggtgttctgttcgatgctctggccggtgacgaggctaatgctgagggacgttgcccaaagcagacgggtgaagcgtttcaacgccattatcgttgtgtttcctgaaccctaaaaaaagtgcaaagggatacagagaggaagctttaaaacccaaaacacgacgtcctgctccttgccgtggatcccgatctcgaaagcaagcagccttaaaacagggatgctggcaccgccgcagcgctgtggggagccaagtcagagccgagagcttggagacccttgcaatcgccagtgattatcgagcgtcggtccatgcaacgaaacaacacgagctgttcatttgtcgactgttggccgcgcgcggttacctcgatttttgtttcaacttgaaagagatgccatctgatatgtcggctgtccatcgtgtcctgttcactctctgccagcgtctttcttgccaatgacagctctcaagcgcgatgacgtcgccaaagctagcggctctcggcaacggttcagtgtttctgccaaggctgatcgacaggctggtctggaacgtcagattctgattgactgccgctcttctttgctcttagaaatcaagacttcttctggcttgtcctctgagctagagacgtggtatgacgacctttacactctgcacgttgctatcgctgattgaccgacagtttgactgcagcagtcagtttgggctgacagctcaccgctgggattatatgtatatcaaatccaggggccggcatccaattgacgccgggatggagcaggagcatcaagctccacccgccggactggacccccgacgcgcgtaactgcaccgccctccctccactaaatgctccttggcatcccatccacaaacgacatcattgtttttgctttaatcatcttttttcttgtctggcgatctttaattctcttggtgtagctcgccatctgttttttttctagtcataagctcgcccgctgcatctctcgtggaaacctgtcgaagtatcgtggagccgggcatcccgagaaccaagaacccaagaaccttgatgactgcatatcctctgggctgagttttgtgttcttatctcacccactgcagccgcatttctcgctcgcgccgctcttacaaccggacttgcttccggctcacatctcacctttccggtcagtgtttgtcaacgacagcaacaatgggcctcccgtcaattcttaggcctcgaaagaggaacacaaccacgcccaccagcgagaaacatgcatccactgggccttcaacgccgacatccaggccagattatcagactggaaatgatacaattccacaagacacacttcgacgggtgaccaaaacccgccgcgtttttgctttgacggcctctatctcatatctcatctcatgggtgtttttggtgctggtatgttattgttggagaaatcttcgctctttgattaccttactgacatggctgcaggtcttgatcggcaacacatatcccaaagccgtgctgtccgatatctacttcttcaggctagacctctcagacatcatccctctgagcgttcccaatgccagactgatcaactccatcgcccaatccattggtctgcacgacttctaccaagttgggctgtggaacttctgtgaaggcttcatcaatgagtaagttcttttactaaaagataccagtgtgtcttcatgctaaccctatcacagaggcatcacttactgttccaaacccgaaaccctctactggttcaaccccgtcgagatcctcatgtccgaactgttggcaggagccacgattgccctccccaccgaaatcattaccattctctccatcctgcaaatcaccagtcagatcatgttcggcttcttcctcacctctgccatcctgacattcctttacatcttcctctcgccgatcgccacaaaatccaagtggtacagcttaccactgtccatcggcgcgtttatcaacatgatgctggtagtggcggcaagcatagtaggcaccgtcatcagcctggtgtttaagtacgcggctgaagcgcagaaggagctcaacatcaagtcctatgtgggcacaaagatgtttgtgttcatgtggttggccgctgggttcggtatcattgggtttgcggtgcacagtggtatgggttgctgctgtgtgagcaggagggatgtcactactgggaggaggacgctgatgcctgatgggcagggggtgcagaggaagtctgtggtgatgaggtgaatgacttaaagcgagcgagtaccagcgggtaattaagagcggagatgataccacattgcatagttagatttttttcatcggcatttaaataggaaggagtttggggggtatataagatattataggcgcctacttctggcatacactaccaccaatcacagcaatccatttcttcattattttacctgatttatataatatatctcgatcattcactcagtattattagtaccctcgtaatatttaccgccagtctactcgccatctatcacactcactgactcatatttcccctattatcttgttctatcttttaaggacagtggatagacgtttacttttgatgaggaagtattcatatgtccaactcacgtcctggccgaagtatatctaatttaaaacatcagtcttggtcgataccctacctagcggctcttttcaagtgtatctccatttatttgcttataatctctttgtcgaaggttcaacattgtacgtgcccttggttgatgatatctagacagaatccgatgttaaacagacacaccccagactatatctcgacacttttactatcagagatcttatgtctgtactatagtactaaccttccccttaaactagaaactcaccacttcaatatctcaccacaccaaccaacacaacgcctccatctctccccaccgctcgaaaccccttcatccactcagctctccaccaccttcaccaccgctcgaaaccttctgcatcgactcaaccccccaccaccctcaccgcatcttagaccgccatacctctcaagcatccaaccgctcccacagaatcctcccagttttcgagagcaaacccttccaacctcgtcctcgacccatcttgcatcaccaaggtccatgctgctgccccaaccaacgttgcaacaaccaactactcggtgcggtgccatacgagatgcgcttgaagcagctctcgctcggtgtctcccgccgtgaaaagcccacgatctgcgagctccccaggcgtgcgctcgcgcaggagcaaccgcactggtaggtaggctagttcggttgcctgggggtgaggtaaggtgtcacagacatggacaggctccgcttgtccaagaggactctgcgatgggcttcggagggcgtggctgttgtggagtacagcctgcaaatccaccgacaagtcggcagcattctgaatgagaacaaacacgacattgccaacatctacgacgccattcggggcctcgcttctggtcgccagtacaaaatgatcaagtacgtcgacttaggttatagacccggaggatttgagcagaatgaaaccgattcttatataaatggactctatcttggtgaaaacgcaatgtgacgaaatattaatgatgtttggaccatgataatcatcagactgtgttacgcagcttgaaccccgggtttatagtatagagcaaatgacccagtgccaaaacgtcgaaggatatagctaagtaaggtacgtattatgaaccttcttggccacttcagtaagatgcctgccctaggtaggaaaactatagacgttgaggtccgaccaaacaattggtaaggtactatcaacaatagaaaattgtacccacatcattctgcataatgaatttcctaatcgggcgatcaacaccaaatctacctgttgcgagcttgtgaatcccttcattctcgatgtcgaggctactgattggagttgctgcctaattgccccactgtttcatgactcacttctcacatcatcgctcttcatgtctccaacattgaccgctttatcgaactcgaacatcacaactcactcagcgtcaaatttaccttcctcacctcatcaccttttcaccacctcgcatcaaaaaaatcagaaccgctaaaatggaagccctcctcaccgaccccctcatcatctccgtaacctcctacgtaaaagactacatgagaaactacgacgcctcccacgactttgaccgtacgccatacctatcccaccccaattccaaatcccatgctaacatccatcaccagacatccaacgcgtcctctccctctcccaccacatctacgcccacaccccccctcaacaacaatccctagacctaaaagcaatccacctctccgccctcctccacgacgtcggcgaccgcaagtccgtttcccctcccctcttcctcccccagtgtctaacttcagcagatacctcctcccaaaccaagacccagcaaccctcatatcaacaaccctcctctccctctcctgcccctcctccctcgcccaaaaagtccaagaaatctgcctcgcagtctcctactccaccgaagtcaaaaacccctcccatgtgcagtccatcctcgccaaacaccccgagttgggggtcgtgcaagacgccgaccggctcgacgccatcggagcggtggggatagcacggatgttcacctttggcggggccaaaggctcccgctcgctgcaggcgagcgtggatcatattgatgagaagttggtcaagttggaggggatgatgaagactgctgaggggaggaggctggcgggggagaggacggagaggttgagacggtttcggggggagtgggaggaggaggtggggtttgtggaaaagttggggttgagtaagggggaggaggagtaggtaaatacctaggtaaggtatgtgttgtggaacgtaggggtttaaaggttggatgggagtattcaagttggtagaaaggctggaaccacacacacacaccaaaatctgagtgtttcccatgtgcgcaggtcatggctgtttacgttcgagattttaatgtcccctatcccaaatctttcttctttttaggattttgtttatgatgtacgagaaataaaaatggattatatattctagaaagcgtgaaacaccatcttgacgacccagcctgcaaaggagcttgacttctgaacataaaggtctgccattatatctgttaaaagacgagaacaaaagattaaagcagccgagatcataacgggacagtatgatataaaatatgagatgctatattggtggtggaattgataaaaataaaaataaaaagctggaaagacaaacgctgtgtgacgggccgggagtcgaaactcggttttcgctcaaacccgggaatgtaataaccgctgtactacctcgccacggaattgctttcgagaattcaggattaagtaccgggcctgcgttgagtttcagccggtgggctctggtgacgaggtgacgttgtcttgacccagcttggctgaagtttaaaaacaccttggaaaaatagggtggtggttgacgacagcatcagtgaaatggacttggaagatcaatggttcttttgtcactgcgtaattgctgaaacttctcaaggctggctcattatcaatcatccatcatcaaacattacactcaaaccccaaccccatcacaacaaccttaacgaagtaaacaagaatccctcaaaaattaaatattacccactcccccccccccatccaacaaccttaaagcaaaaaagcagcaacaacacccaaaacaaccatagctcccgctgcctgcttcccagccgctccagcagtaacagcaggtgtctcggtaggcacgtaaacaggataggtcttggacccaataatcgtcacagtatccgtgtgatgaggcttggtatgcggagtgtagactgactgaacagactgaacagaaacgaccgtcttgtggtgatgtttggtatgatactccgtctcggtctcggtgtagacggatggcttgacataaatcttggtcttgtattcggtctcagtcttggtgggcctgttccagatgtgagtggtggtcgtctcggtgtagggcggggtgtaagtaggcttgatacgggtggtggtggtttctggctctgggcggccggcggcaacgagggaggaggccatgaaggcgccgaggagagagaagagcttcatcttggtgatgatattagagtggtagatggtctgagtgaaattgagagtttgactggtgtcaacaaacgaatgaagtgatcaaatgacgggcactcgtgatgatgcaggaggaatcccagaattcggttaccttgaggggcaggattgggttataaacaaccgccgggcgatgtcatggccgaatgcatcatcgagagaggatggcagtaaacaaaggagaacgtccaagcttggtggtgatgtgtacccggaagcgttagcaaatcccatgttgacgaggctgagctggaagaacaaagaaacctgtgtttacacagaaatgatgcagctccatattgacaccggggtaggcctcggttgcgccatccttcacttgaacaactggatgatgtgtttgcccctacctacctatgtaaaaggtcagaggcaacccaagacaagccggcgtggtgttcctcggctatgagagtcagcgtgggcggaatgtttctcgtggcttcgcgggtcctgctacatacattcctgagttcaccaggtaagtgcatcgatgcggtcaaaatgcgccgaatccgtcacggacaaaattccagaatgaaagttgaagcctgtaaactcagttagtcgtgtaattatgatctgaccggaaacggctgcagttaactgtaccagcctgaagtccatttccggacgttgtgcagaaacgtagagaagagtgagagtcaggagagtgtcgtaggtaggccaccatggtagctgctaccatgtcccgtatttacaccccccaaagggcggacattctggttggtcttttaatacaaacgatactattgcaatgtaagagaaaatgagggcggcacacgaggtcgctcatgatcaaataccaaagaggcattcaagctacccccacctcgaactttcaggcagcgggaaatactaatctcgagttacctttgctccttccctgaaagtcacgtccttaaagcaggcgtcctctatcatgctctgcctactgtgatctgtcaattctctcgacgtcacaagtggcccaagcttcatcgggtagtcccgacattccatccacgctgctggatgcagcagtgtcatacaatattcttgttgctctttgtttggtcaaaaatagacgggattccatcagctgagcgcattgtcatcaacaatgcttagttttcagcaagccttaacttataccaaccctaacccgagcaccagctacagcagttttccatcatcaatgtttcactcattggagcgaagctctaagtcatagtaaggatagtctatagatggaacttcgctctgcatactgtaattgaaatcgtcaaagggcggtatttgagaaggagtctcgtttctgccttctataggtaaccacatccaaagtcttgttcttctaagtagcaacacgatacatatttatcacgccgctattataattagatgatatatatatgctgctgatggacgttgagtatctatataactccgcctccatagagcttttgcgtgagatacttctttgttggagtagctctgaatagctatctatctatatatatatacatcctaagttataaatatcttttaaaatactcttttaatctgatctttttttactataattccaagctcgtatagttatcagtcctagctttttagatcttaataaatacttaattccagcatttttctgtctaaataatcagctaactccagctctcactatcaaagctatatataacaaaggctgaaactacttattgtctttaaaatgcttatattatagtgtaaaaacttggatcaagcattcaagagcgagattaacatacataaatttttataccggatgtgacgacatatagcctagagcaggatactgggttggagttgggaggaccagggctgaggacgagggctgaggacaggactgcagccaatgggagagcaggaaaaaatagcacaggccaagtggggcaacaagcagggcagggcatagatatttgggagagcgagcaggcctactacactttacttttctttttttcttgatctcacaattactttagctacggaatactatattggccttgacttgtaagacctcagcttcgtgacaattgttcttatatcttgcgttgcgcctcaacgctttgtttttttttttggtttttttgttggagagaaaacttccttattataatccaagctttgtttctactaatccaagcatattatatccaaaagctatcctcaacacgctaggacaaaagggataaaaaagctcaaattatcgacatagaaagtttggattatagacggcaaaagctgagactaaatttggatcactgttaaaagagcttggattgagtactaaaattctaaagcaaaaagtcccctgcagtgtgtaacatgtataaaagcgaaagatgcgtgcggtgtggtgtgtagcatacatcaaaagcaaaagataggggccacccggggattgaacccgggacctctcgcaagctaatattctgagaagaattttcactttgtaaacatcagggtgagccctaagcgagaatcataccactagaccagcggccctgttttcacatcatttcagatgtggatgtctctcggtggcagaagctccagctaagtagcgccaccctgccagctccgtttcccggcatgattcaactcctaaccccaattcataaccccaactattcaccacggtgataccttccagctttggcgtcaatggatgcaaaatatggtgtgaggtttacaaatcctttgtgtcttcgtctgcaggggggtcaatgtcgaggacgctcagggggctgttatgcatcagtcaaacatccacataaaggcaaaaaatagcaaacctaccccttcttgaccatgatactcataatctcaaatagcgcatccgcagccgccatcgtggtgtgctcagcgttggtatcataggcgggctgttatcacacccccttgtcagccatcatcatctctccctaacccgccctttcaccacagccgtatcaagaaggaactcacagcaacctcaacaatatccgcccccaccaaattcaccccctccaaccccctcaaaatagtcctcaactccctcgtgctccaaccccccgtctcgggcgtgcccgtggcaggcgcaaaagccggatcaagcgtatcaatatccaggctcaaataaacagggttcttcgtcccgacccgttcccttatcttcttgatgattccctccgtccctatagtgtcaatctccctcgcctccacaatctcgaagccgcaatagccatcgttctcataatcactcggccccgaaagagttgtgcggattcccgcgtggatgtttgtgtcgtttcgcaaaaggccctcctgtgccgcgtggtagaaatacgttccgtggttgatggaggccgtttccgaaggcgagccgccgaatacctttggcttccaggtgtcgaggtgggagtcaaagtggatgactgtcacggggccgtaggcgcgattgatagaacgtaaaagggggagtgtgatggtgtggtcgcctccaagggtgatcactctcgggagggtcttgcctttgagggaggggccgggtttggtggcgtccgtggttggggggcgggagaggatggagaagtggccgttttcaatttggtggagggcgtaggtgttgtcgtaggatgtcaccgggatgtcgccgcagtctatgactttggcccaggagttgaaggggtttgtgtcgagggggacgttgtagccgccgctagaagggggccgtcagtcggtgtggatggtagaggtgaggagggttacacatactagaggttgagccttcttgaaccctgccggatgccggaggggccgaacctagcgccgggacggtaggacgtgcccgtgtcgaagggagcgccttgtttatttatgcttattagcctggctgcctgacgttgtgtatgcaggcggttgattgttgtgtaacagacgtaccaatgaaagcgatgtcatagtcaatgtccttgtgaaagagacaaggaagataaggaaggcgcccaaaggttgagatgccagagaagacagagtccgcctgtgagctgtgttagccaacaagacatggaagatctctagatgactgacctgagtccctccatcgcctggcaaggtgttgtaccacagagatttgtgaggcccggccatgttcttttgatgctcatggtcaccatgtgccagaacggcagctgtaagccacagggcgagcagaccctgagttgccataatgtcgatttgtgagttccgatgtgtgatgttgatacagacaccagagcagcgaaaatatggccaaggcatcactccttttatggtccagcgcacctttcccctcggcctgggactctgcgagccatcgaccaacagtcgtcaccacttgcagcagcccaattcccttgaagcacatctccggccttatcacagataatgacatgcctcaaactcccccaagcccatttcactggacgtccttccacgaaccaccactgcatgtcatctcaacggttctcgttaggtaacggtcgttccatcatctcagtggaagcatcacgtcccatctcatgcgggagcgacaggagagataaagcagagcgtgtagagcatgttcccgactgggactgcagaagacagtacaccaattataaggctttatgcgatgctgcaatggcaagctcgtcgaattctcggaatcccacactctggacgttggataattcgaccactaatggaatctcttttacttgaagcgatcgagacccgggaatgcggggctaccgttccagtgcgaatgacatcaacggtctggagcgggggaactggtccatgggggattggagatagatagccgttgggagtgggatgttgctatctcggagacgtatgtatgtataagtgcagatgccccctttggtggcgatgtggtcattggtctttatttctcatacattcggtggcacgcaggtcctattcgctgctcagatatggtgacatttgatcgaggagataagagcgagttatggaattgtgtgagttttgaatttcttacaaatttatttccgagtcggagatatgtggtcacctcctcattcaaacatataatagagcccatggacagctttgtctcgactcccgatcttgtctccccatccacacacttgtgttacgatgcgggatcccccccttgtggtcgacggaagaaagaatatctgaaaggaccctgcactcaaagacgtttcaagcccaacacgtggttcccgagacatggagcaaaagaaggccattgttgtccagggatgacacttgttgaacccaggaaacggccgaaggcaaagagtacgagaagaagaaagagaaggagaaggagaaaacaaccgccgggctgacttgggctggaacggctggtgaggtcaccgtcttcaccatggttgaggcgatctcattcgtcccgttcatcctgcggccagtgggaccacctccggtgcgtagggcagtttcttgcgctgattcggccggtgccctgatttcgctgcagagtgggcggggccgtgagccggctcctgaaaaagcgcagctaaaaacgactgatgcagcagccggtcgtgtcccacatcagaagctgccgtgctgcggcaggacagcgcaacggatggccactggatagcactgcgtttctgcctgcccggatccgctttgggagaggccatttcatgcattgataaggatacgtggacgttgttgctggatattgggcagagccagagagaaccaacaatggaaatggacaatgcaattctagctgaacgagatgcaaatcgtcatcgaggtcgagacaagacttccagactgggcggggagtggagctcttgttctccttgttccccgccgtgggaaaggcttggcagggaagttagggattctcagcgcgggctcaagctaggggtaccctcctctcgttcccagcccgcctattttgaggtgcatcaaagaccgggccaatcacaagaaaacccctcgaacaggacagttgaatggggatggaccaaatggacttggaagaagatgctcttcctcagcgtgcatttacattgcatttccctccattcatcactctctctttctagacagacactatcgggcacgcgctgcttcccccggtcccgcccttgatcatatgctccgcccaggtgtccctccttctcactcacgctgtgtctcgaggtgattcgctctttgcgtgaacaaggaaggtcccgaacctgccacttgtcgatgtctcacacaggtcgctgccatctgcctctatccaggacgctgtcctccggccgcaactttccttctgtgatacctcgcccagcagcttcgccgagaggaaccctgcgtggcgcattctttttccaacagtgaaatcactcgccgccaccgcagcacatttccaacaacgacgtaagcaaatcatcaaacatgatgccaatctctctcctttgactctttcttccaacaactcgttcacccctccagaccatcgccggacaagccgcctttcttctccgatgacggtagacggccggggacctgcgctccccgttatgggtttgtcccaggttgaccaggcttttggcttggaagcggaccgcctcaaaaaccagccgcgcatgttcaagaggcacaaggttctgccacacccacgcaaagaggccgttgtgggagtaacgaacttgcaagttcaacggtcgcgatcgcgttccgggccggaaaagcatgtcgagactgaacctccgctgtcacaaactgttatctccccggcgagtcgacgacctcgtcagcaagggctccacgtaccaagacagcgacgaggaaggggtcctgaaccgccaccaacgccgccagcgcattcacgaacctcgtcgacgagccatcccgttgacccgtccagcgacgagccggatgacgctgaaagcccggcgcaaagcatagagacggtccagccgcagtctccagctacccctcctaatccacagacacctctcacgcccgaaataacacccccaggtccggctgagtctcagctcagggcacgacctccgctttatgatcgactccagtcgaaaatcaccaccgagtcgagcttccagtcgtatagaaccgcgccagaggttcctctgacgtctcctgatgaggaggacggcgggtcatcgctcctgagaccggtgctctcatcagcccagacatctcggagcactgtcaggcagttgaaggcggatgggaaagagaaggttcagcccgtgggcttggggcttgggctcgagtcgggtgagaaggaagccgaggctccaaataaaaccagggaatttgagaaatttgatggagggtggacatgcgagaatggtgaggtggcagaggaatggaacgcaactcgcatgaggaatgtgtcgataagaaagcgaaaggtatcagcgcaaaaaatggaggatcacaacaacaacgaggtccttgaggactcgactgtgtctgcaacaaacgccaccaaagcgctgcgctctgtgtcgctacaggacagcccgacgacctatcctgcacgcagagtcgtctcagatcgggtgccgaatcgaggaccgccgtccatgtccgaatcttcgataggctctgacgccaagcgctcctccatcatgtccaataggtcgacaacttcgactgtggtcgaccaccccgatgcagcccctcggcggcggaagacgctacgacacatgaagaagcagattgacttgcgcgactccagctccgagctttcacctgccagttcagcgcctacatctacgtcggcagccgtggaagaaccacgtagggggcctctgccagcttcgagactaggagacactgggcgagatagccatgcgtctatggctactttgagctcaatttcgagtcacaaagctcggcgagaggcctggaaagcgggcgcgattgcggttgccattgtgcccgaacgtcgatcgtcgatcaagtccaacaagtccaacactgcaagaaccccgtctttgaggtcaacaagcacgaggcgatcccagcgaagccagagtctcagctctgcaccgcaatcacgtacatccaagagcgttgagcgagttcctatctttgatcgaccacaacgccgaggtagagcccactccgaatcagatggaggtagaagtgctggagatgagcggacgatcgattttcctcctgtgataccgaagcggtcgtcttctctctcggcccctacgagtaggaatgcttctagaagtggctcgcttacggcagagagcctcaaggcgcacaacgccatccaggcacagcatcaagaactgcaaaaggctagccgggagctcaataagcttgtaaaccagcacgcggagagtaatgagagggtcagagagcaaagggtggggctgcaacatccccctgagctgaagattgtcaccaagtctccgcagcccgaagtcacaatccagcaggttctgccggaacagcgtgctgagagtagaaagactgtgtcaagcccagaccgcgaaggggatgaccatcacctttccgtggatcggtacggtgacccgttgtttggaaagcggctctctgcccagaacacccccttttctatcgcttcagtcgagacggcgggcacttctcacgctgaagtctcggaggccatggcggttaatatctacccgcaccagagcaagtctgtcgtgctggtcgaccactcagccaagccttccgagagctcctcgctcgagaatcctgtcataatcgcagaaccagccacaccaccccagaggcggttttcttttgaagaagtcgtcgactcaccgttgcgaaacccgcgagcccctcccgagccacctcgtccgccagtcatcaacttcatcccggctactccctcgggcttgacgcccatgacggaaaggcagaagatgctggggaactactttgaggtgaatggtgagggtgaaaagccaaagcgtagccagtcgctgcttcggcgtgccttgactggggggcggaagaagccggttggtgatcagtatggtccttcaccgtcccgtccagggttgataactaggactttctcccttggccgtcatgaatccaaaccgcagcggccgggtctcaagcgccgccgtagtacggatgatcatcccagggatgagcaccttctccaccccttttggcgacctgcctacgcggaagactcgatgtccgattctgaatccgacccagacgaagactattatgaggagaggggaagaaggtacaagtacccgcttattgacaaccgccctggtggtgctcctgctagaagaaggagtttgagccagcgtctcaagcggacgtttgcgattttgccggtgcaggataaacaccaggatgatgggtacgaggatgattactatgctgttgctgccgggtcggggccaaatggcgaggttgaccggagaacgattaggaggacgccatcggggaatctgagggttatgcgctttcggaagtcgttggagtcgcttaggccggtgacggcgccggaacagcagcagcaggtgtcgaggccgccggttacacggattgggaggccgctgcaggggttggtgagacggttgtcgaggggacggtcacaggagaggccggtggggatcggggttggatcatcattggtgggtgggagtgctggggaggagaaggggggctgggtggataggatgaatttggggaggaggttgagcgagaagcggagggagaaaaggacggaggagttgaggaagatgatttcgaggccgagggaggtgagggatggggtgggggatgtgattagacggatgagttgggttgaggagcagagggagagggagagggggggtggttgtgggatggggatggggggggataaggggagggcgggaaggatgacgattattgattatgggtatatgaatgcatgagtttgggttggaatttcatggagggatgtaggtcagggaagagggcatgtatgtgattatgatgtttacgtttttttttgttttgggagcgtctgttgggagatatgggtattgtggtgtgggtgtgggaaagggtatgtgatgaatatatgagatatgactgggtgtgatgtcttttttttttctctttgttattcttttaggggggtgttgatatgtcagattatgtaggtggttagcttttgaagtgtttggcggcgttagcgataagacttgggttttgggaggtgtgggttatgaaaaatgcaagtttttggtactcttttatgaagacttttgatatgtagtgtgaggttgaatgagcttaagtaggacaggtatgatgtgctatttatgctatatcctcacttgctcttgctcttctctccccttcgcagctgggcactccttttcttatttacccatcagcgatgtcatcaccttcgcacatcaccatcatcagcaccttcgcttatacctaatttatttgcatcccagatatgccatatacactacctacggtattctatatactttaatcatctaaacactataactatgccgcttagaaccgtagttgattgttttaagacgaagagcagcgctctggggcactaaatcttttatccaagcatatagtgttaagagtaatgacattcaacctatgagtctgagcttgaaatagatagtaaaagttgggatcattgttaaatctgagattgaaatggatagtaaaagttgggattaacgttaaatctgagctttaaataccttagaatacttgctctatatatatctctttattactctttatgcgcatccatatataacactctttgtgcatttctatatgtaatacccttaatgaatctctacatatagccctgaaaacacattgctcttgttctctctttcgtagaccgagtgctctttttctgcttcacacatctacatcaccacttttaggtcctaaccaaattagcaccttcgcctatactttattgcgtcctatatataccgatgccacatggcctccatgcggatgaggctcttactaacccttacattgaactactatctgcggtagttcttattgtccacatgggagcgtggcatgaaagactattaaataaatagctttaccccttgaatttttccacatggagttcttctactttttcctcacgcatcactaatatcattaccttgtccatgcttttatacatctcatatatatacctatataatatataccaggtgccatgtgccatggcctccatgtaggtgaggctcttaatccgagctcacttgctataacaacgacgtctataatgataataacgacaatagataccacagttacaatcaccacttactacagcaacggcaacggtagacactgcatttataatacctactctcgtctcggcttaactgcctcgctcttcgtcttctgttgggctggcgacctaggaaagtcactggctgcgaaaatgaggctaaaatggccaaaaaatggtaagcaaattggtattacagtagttggttgttggttaaaaagtaaacagtaagaaaatccagccccaagagcaaaccggtgtgggtctgggaaaacctgggccctttggtgccccacacccccccacagacagcacaccgccgtccaaaatgaagccatcgccaatatcctccgaagcccaatatacgcccagattcttccacttcctttgactcctttgcccaatgccctagtggcctttttcccatacaaatacacgttctcctgcatatttcaaaccggaaaatctcgcattcccaacagctgcacaaactttgcgtgcttctccctttgtagtgcctttgtgaatccatccgccggcatctccaacccagagatgtgttgaataccaaatcttccttccttcacttgttcacccacccacttgtaccgtatatcgatacaccgggtcctagcgatattctgagggttcagaactgtgatttcggcgttcttactatcggtgtacagcatgtatggccttggctgtggcacaccacagtcttccaatatctttgacacccactgcagtgaataccctgtaggcgtcaggttggcaaactctgcctccgtcgtactcagggcgacgaaggtctgcttcttactcttccacaatactggcccaccagccacgaagacgacgtggccgccagtggaatatctccaaggtaagacatccgcgtgtgaggcatctgcgaatcccacaagcttcatatcttctgccgagaactcggagcctcccagcacaatacacagcttcctggtggcagccaggtaccggaaaaggtgcttcatcaactccannnnnnnnnnnnnnnnnnnnnnnnnnnnnnnnnnnnnnnnnnnnnnnnnnnnnnnnnnnnnnnnnnnnnnnnnnnnnnnnnnnnnnnnnnnnnnnnnnnnnnnnnnnnnnnnnnnnnnnnnnnnnnnnnnnnnnnnnnnnnnnnnnnnnnnnnnnnnnnnnnnnnnnnnnnnnnnnnnnnnnnnnnnnnnnnnnnngaacttctcgagtaaggcgtcgatataggccacctgggacagtagacctgcctcttcccgcggttcctcacgatatcaaaacccaagaacctcttcggctcgcctagtttcttgatgccatacttgctctccagcccggtggcgatatcttcaatgattttcgtcgtaggcactaatataagtaggtcatccacgtacaggactaccagggcacctgtctctttgtgacggaacaggcagaggtctgatgagagggtatcgaagcccagttcaaccatcacaggtttcactgtctcgtaccagtagataggtgacttcctcaggccgtataatgcccttttaagccggcacaccttgcccagtggcttgcccaagccatctggtggtcgtacgtagtatgtgcggtgtcagggattttagcgttgagaaatgccatcttgaagtcgtattgaaggcactcccagtcattcacggctgtaatagcccaaaagcatttgactgccacgctactcacaacggcggcgtagacgtcctgtgtggcccaggagtccctatcaaagttgccacacaccacccacctcgccctggccttcacctcaccagtttgagggtccatcttctcatcgtatacccatttgctcggtaagacgttgtagcctttcggcgtatccaccagctcgtagacgtccttttccaacaggccggcgtcctgctccttcatggcaggcagccaatacttgtggtagttctcgagcttcctcgcttgccggtagttcctgggtatatgggacttgttaatggtttgcagaaggtggtcgattttgaccgtggatagggcgtaggccactacctcacgtagtcgtgggttgtcgagatgtactgtaaaaaaaccttagtaagggtgtttaccctgctgtagcttcttgtagaagcctggtccctgattttttgttggttgtctgcgaggccgctcctgagccggcggagaagccaccgcttcctccatatggcctgtatcaggctcgaaatcgtcgtcagagtcttcgaccaggctttccgtgcctgaatccagtagcctgccatcggcctggtcatcaccaggcccccccatagcctcaccctcctccccccccatcagcctcgcaggggaggtgagctctctcatagcaggagagtcagtggtatagggcgcttagtcatggtttggtgggataggtgcctcggaccgtatatcctccacctcttcggcgtcgaaaaagtcttccacgtctaaggcctcaggtagtggaggtagtgttggtgacggcgtagctttcggagtaggtagaatggtctgcccagggtccttggccttccctgtttcaactgttggagcactctgctgtggatcgggctccagtatggtagtaggtttgtcatcgaaggtgaccttcctccccaaggataccgttctgttggtgacggcatcttcttcttcggctatagtactatcagtaaagactgcctcgtactcaatatccttatactcatcgtcgtcaggcctataaaaatcgccttcgttaaacttcacggcgttgaccttcacgactttgtcagtgactgggttccagacccagtatattttgccgtatatatctgcgtagccaataagctttcctttctccgccctggcggtgaacttatccgaattggcccggtaggccggcttaacgtagtaatacgcgtcgcaaaagtacgagcgtaggtgccgaatatacggcttccgctcgccctcgggcatgttgagccttgtggtatacttctcgtgagcactgatatctccctcgttgaccctcgagggcagtaggttacccacgtaaaccacagactgcatgacaaatgggaacagcttctctggcaccttgtaggccagcatgatagccctggtgcggttaagcgtagtcctcgcggccctctccacctttccattcatccacggtgagtgaggcacggnnnnnnnnnnnnnnnnnnnnnnnnnnnnnnnnnnnnnnnnnnnnnnnnnnnnnnnnnnnnnnnnnnnnnnnnnnnnnnnnnnnnnnnnnnnnnnnnnnnnnnnnnnnnnnnnnnnnnnnnnnnnnnnnnnnnnnnnnnnnnnnnnnnnnnnnnnnnnnnnnnnnnnnnnnnnnnnnnnnnnnnnnnnnnnnnnnnnnnnnnnnnnnnnnnnnnnnnnnnnnnnnnnnnnnnnnnnnnnnnnnnnnnnnnnnnnnnnnnaatccttgaccttatcgaatacctgctttttctccactatgaagttaatccacttgtagccactccacatatctacgtattggatagagtacttgtaacccagatatccagggttcttgtgggtgacgacgtcgatacggataaagtcgaacgggttgttggtctgcgaaggggtcgatgagcctagttgatctgttatctttgccatcacgcagggctcgcagaaaaagtcattgccgacgagcttaatacccgcctacgtacaagccttgtaaatatcgtccttattggcgtgcattaggcggcgatgcattacccggtagttgatagatgccatcacggccttgatgggagtcttcgccagggatactttgctgaaatcggcgccgggcgtcgtattcatctggtatacgttgttattcctggtcaactcacacaccacctgcttagtacctctaaggaccaggttatggctctcctagtcccagaagataccttcatcgagtagcttgcccgccgatatcagattgacgggcgcctgtgggtggtataccgcttccttaagctccagggtaacaacctggccacttaaaagggtagattgcagcgctgcagcaccctggtagctgcactttgtgatatctcctaacgacgaaaggaacctcttttccttcccctcaggtagtaagtggagctcggtgaaccacttcagtttattgaatacgaaatccgcgcatccggagtcgtagtacacgtggtctttaaatgcctcgacggcctgttggacttcaggggcatctactgacgagagtgctgcctctgggggccgagacgaaaatccgattggtcatcgtcatggtaggtggggagcgatatattggcgaagttgttggacagtatcagggtactgtgggcaggtcggtccctcgaagacccagtattagtgacgccaccagtatggccttgaagagtccctgttgacgagccagtactctgccgcctctcttgcctatccgcttatgccttttccctgtgctcccaatcctttggagccttgtcagggtcacaccaccaacaggccttgcccttcgggtggtgacgaccacagcccatgcagtgctggttgcctttcctcaagcccttggtgcattggtcgcacttcttcgtcgaggttgatgatgtggcaggtgagggtatagtcgcggccggggccttggtggtctcgatggtgattttggagtgagccggcgtggtctcctccgtaacggccttggcgctatactcctggcaaagaagcgaccaggtcatggtgccgtcttccatcttccttgctagccggtcgtacaaatcggggtacgcggtcttgatgccgttcagggcagcccagaggtaagccacgtggccgatcttgatttccatcgtatcaagacgacggcgaaggacctcgagccggctgaagtaggcttggaatgaggcgaagttggcacgcttgagagtgaaatactcctccaaaagcataccagcgatgtcgaaagtgccgcgctgtagggcttggataatcttctggtatagaccataggcactaatgccgtcggccttccaacccaggttgagaattcgttgtcggatctcgggcttcttgacggaagccatcattaggttctggatgtccaggttgttagtacgccattggtcgaaggcaggtgtcccttcttccgctggtggctgtatattagccttgatgtagtcctccaagccatggtacataagggactgggttaactgaaattcccagccggaaagatcggtctctgagttcagagccggcaaggcttgaaaggttcgttgcctaaccgtagcgacggtgttggcattccccatagctttcacaagctccaagagctgggccatggtgacgttagtgccagccatcttgaaagaaaaactggtcaaagagaagtcgtaagaaagacgctgtgagaaagacgtcgaaagaaagactcaaagaaaggcgccacctgactttgtggccgccaacagtgggttgaattgacttggacagagggcgagatgcttgctccgctatcggtctcctgataaggcagnnnnnnnnnnnnnnnnnnnnnnnnnnnnnnnnnnnnnnnnnnnnnnnnnnnnnnnnnnnnnnnnnnnnnnnnnnnnnnnnnnnnnnnnnnnnnnnnnnnnnnnnnnnnnnnnnnnnnnnnnnnnnnnnnnnnnnnnnnnnnnnnnnnnnnnnnnnnnnnnnnnnnnnnnnnnnnnnnnnnnnnnnnattaaattatttttatgaaattagtgtggtaaatatttaaagggttggtatggtgtggttttataggatggggggattatttgatgtggggttaatattatgttgtttttataagatatttagattttggtagttgctgggtgagggggaatataaagagttttaggaagggttgattgttgggtagatatatagcattaggcagtataaaaaaaaaattattaggtttggtttatatataaagggttaaggggaggggggtggggttttaggtgggtaaaatttggtgtaaaggctaatgaatgattgttaaaaaagaccgttttagaaagtccttatagccttttgatccactttattttgaccatataaagaagataaactaagatccaaaaatgtctggtgaatatcatagtttgagaaggacgtttaaaatcaatcgtagataataagagttgcaaggtctaacatcacactagagataccctatagatgtggtttgaaagtgttgcctcgtgctattagcctttcccgggtcgaacgtaagctacggataacatagaatgaaagaatgcttggaactttctaattaggccttcgaggaaatataactaccagcgacaactggacaagctagtagacacaggaaaattatcatgctccagtgtgtctttgctgacccatgtgtgggcttaacagaaaggcaggatcaggtgaatactgatatgagaagtcaccgtagcattccaaataatgggtgcaatgatgatgaattgtctggaagagctagggcaacgggagagttatatatgtacggtgtttgccagtgctttgccagtgccttgccagtgtcctaacaaatgctgggagcaatcacactaccgctatagcaattggaagccctattaatcgttttgagacgatgtaacgaacccctatccagtacctctgaaaaggatactggttgaaggcacttctgaacaatcctggttcggtacagctaaacagtgtacaacaaatggcttgtctcaattacaatagctaagataccacgattgtgacttgtaattgcatactgcggaactgtctatctatactagctagttcctccgtatatatagacctagtagtctcctggatcattaactcttgataatgatcccacagacgaggctactcccgtcctgattggttctactagcgattggctgtgcgtgtcgtaccccgcacacggtccgtcttgcctgttagcttaaccgtgacagacggctagtcttttacatgctagataaagcagctttcttaaacgcttaatattttatccgagcaattaatgtcgataatctaagcttagaatagacaataaaagttgggattaacttttaagaagacagagaaaatctcatgaaaacgttattttataacgctaatatccaatgttaattatttcgacagttaagagctttcgagctggaaaagcattagctgcataaacttttaatatagtgcaaagctagatacgagcatatccaactccaaaaaaaaaacttattttacaacgcgcgaagtctctaacgttagtttttttcataattagaagcatactgtaatattgtctttacagagcctcgcagttatgtatctgtcacgcggctgccttcaaacgtcaagtaacgctgactgcgtagctgaacctttagcataaactattaatctgttacgaatataatgtggacacccgcaaagaacaactaatagggaagaggaggcacggcagccaatcaagagaaaggaggatggaccagtaagaggtggatcatccgggatatgaaggaattatgagcgattcccaggaatcactcatgatccttaggagttggttataatccggggagaaacaaaatgatccaggcttagcattaggtctatatatacagaggaactagatagcttgcaaatagttccgcagtatgcaattcacaattatattcacggtatcttgtgtttacattaagacatcttattgtgcactatttagctgcactaaaccaattgtcagaagttacctttaccccgtatccctttcagaggttttgtacaggggttcgtcacacactagccgcgaaaaagaaggctaaaaagccaaagattacttggtgttacggcttgataggtaagtctaggataaagcaatagttatactataccatattgatttaaatataagctaaagagaaaannnnnnnnnnnnnnnnnnnnnnnnnnnnnnnnnnnnnnnnnnnnnnnnnnnnnnnnnnnnnnnnnnnnnnnnnnnnnnnnnnnnnnnnnnnnnnnnnnnncaatatccttatactcatcgtcgtcaggcctataaaaatcgccttcgttaaacttcacggcgttgaccttcacgactttgtcagtgactgggttccagacccagtatattttgccgtatatatctgcgtagccaataagctttcctttctccgccctggcggtgaacttatccgaattggcccggtaggccggcttaacgtagtaatacgcgtcgcaaaagtacgagcgtaggtgccgaatatacggcttccgctcgccctcgggcatgttgagccttgtggtatacttctcgtgagcactgatatctccctcgttgaccctcgagggcagtaggttacccacgtaaaccacagactgcatgacaaatgggaacagcttctctggcaccttgtaggccagcatgatagccctggtgcggttaagcgtagtcctcgcggccctctccacctttccattcatccacggtgagtgaggcacggtcttgaggatggtgatgccctcctggtcggcccaggcggccatacggctgtcgtcaaaggtcccagagccctgggcaaattccgtaccgccgtcaaggccgatgatgctgatcttatgcccggtttggcgcgcgatcttcgtctcgaaatccttgaccttatcgaatacctgctttttctccactatgaagttaatccacttgtagccactccacatatctacgtattggatagagtacttgtaacccagatatccagggttcttgtgggtgacgacgtcgatacggataaagtcgaacgggttgttggtctgcgaaggggtcgatgagcctagttgatctgttatctttgccatcacgcagggctcgcagaaaaagtcattgccgacgagcttaatacccgcctacgtacaagccttgtaaatatcgtccttattggcgtgcattaggcggcgatgcattacccggtagttgatagatgccatcacggccttgatgggagtcttcgccagggatactttgctgaaatcggcgccgggcgtcgtattcatctggtatacgttgttattcctggtcaactcacacaccacctgcttagtacctctaaggaccaggttatggctctcctagtcccagaagataccttcatcgagtagcttgcccgccgatatcagattgacgggcgcctgtgggtggtataccgcttccttaagctccagggtaacaacctggccacttaaaagggtagattgcagcgctgcagcaccctggtagctgcactttgtgatatctcctaacgacgaaaggaacctcttttccttcccctcaggtaataannnnnnnnnnnnnnnnnnnnnnnnnnnnnnnnnnnnnnnnnnnnnnnnnnnnnnnnnnnnnnnnnnnnnnnnnnnnnnnnnnnnnnnnnnnnnnnnnnnnnnnnnnnnnnnnnnnnnnnnnnnnnnnnnnnnnnnnnnnnnnnnnnnnnnnnnnnnnnnnnnnnnnnnnnnnnnnnnnnnnnnnnnnnnnnnnnnnnnnnnnnnnnnnnnnnnnnnnnnnnnnnnnnnnnnnnnnnnnnnnnnnnnnnnnnnnnnnnnnnnnnnnnnnnnnnnnnnnnnnnnnnnnnnnnnnnnnnnnnnnnnnnnnnnnnnnnnnnnnnnnnnnnnnnnnnnnnnnnnnnnnnnnnnnnnnnnnnnnnnnnnnnnnnnnnnnnnnnnnnnnnnnnnnnnnnnnnnnnnnnnnnnnnnnnnnnnnnnnnnnnnnnnnnnnnnnnnnnnnnnnnnnnnnnnnnnnnnnnnnnnnnnnnnnnnnnnnnnnnnnnnnnnnnnnnnnnnnnnnnnnnnnnnnnnnnnnnnnnnnnnnnnnnnnnnnnnnnnnnnnnnnnnnnnnnnnnnnnnnnnnnnnnnnnnnnnnnnnnnnnnnnnnnnnnnnnnnnnnnnnnnnnnnnnnnnnnnnnnnnnnnnnnnnnnnnnnnnnnnnnnnnnnnnnnnnnnnnnnnnnnnnnnnnnnnnnnnnnnnnnnnnnnnnnnnnnnntaactgaaattcccagccggaaagatcggtctctgagttcagagccggcaaggcttgaaaggttcgttgcctaaccgtagcgacggtgttggcattccccatagctttcacaagctccaagagctgggccatggtgacgttagtgccagccatcttgaaagaaaaactggtcaaagagaagtcgtaagaaagacgctgtgagaaagacgtcgaaagaaagactcaaagaaaggcgccacctgactttgtggccgccaacagtgggttgaattgacttgggcagagggcgagatgctttctccgctatcggtctcctgataaggcaggacagagttctcgactgctgccggaaaacagtaatttcccagccaaaaggtcgcaaaaatggcagaaccaaggaaacttggccaggagaaggttggcgccgtaaaccacactcttatcggtgaggggtggtcggtcgcttcaactcttcgtcaagatgagggtcagggttaaaaccaggcttccgttgattaggaagttggttaactctctcaacgcctccaaaatcgccgtcgaaaggtccaattgcgtgatattggcctgacaagggtcgaaaagtcgtaaggtccggtgtggtattcggccttgcgaggtcgggttgtcgacgagggcgtcgacttcggtttacttggtgatttaagcgtcaaaagagctcataacctgttgggctggcgacctaggaaagtcactggctgcgaaaatgaggctaaaatggccaaaaaatggtaagcaaattggtattacagtagttggttgttggttaaaaagtaaacagtaagaaaatccagccccaagagcaaaccggtgtgggtctgggaaaacctgggccctttggtgccccacatcttctgttcgtcaccccttttctccgcacataagtagcacaacactccatcattttcgcacaaacctgctttaaagcatgagacgcagccgtcctcttcttgctcgtccatcattagatactagagctcaccgtcttgctcttcttttaccccttacaccttgagacacggccgtcttcgtctctctcgcccatcaccatcttcctcgcccatctaccaccaccatcacagtcttgggtaggcaggttactcgtcgtagatatgttgagcgccttgctgttcctcttcctgttatagcatcgccccattatttcatcttcccttcatagtatcttctttttatagcagagtgacatggtcctacttcctcgctcaccaccaagatcaacacttttaccaacccttcattctgccctacatatagaccatgtaccactagaaggtaagagtggggagctttgctttagagataaaggggtaaggggaggggggtggggttttagctacctaaaagttcctctaaagccgaagcaatcaggcttaaaaagaccgttttagaaagtccttatagccttttgctccactttattttgaccatataaagaagataaactaagatccacnnnnnnnnnnnnnnnnnnnnnnnnnnnnnnnnnnnnnnnnnnnnnnnnnnnnnnnnnnnnnnnnnnnnnnnnnnnnnnnnnnnnnnnnnnnnnnnnnnnnnnnnnnnnnnnnnnnnnnnnnnnnnnnnnnnnnnnnnnnnnnnnnnnnnnnnnnnnnnnnnnnnnnnnnnnnnnnnnnnnnnnnnnnnnnnnnnnnnnnnnnnnnnnnnnnnnnnnnnnnnnnnnnnnnnnnnnnnnnnnnnnnnnnnnnnnnnnnnnnnnnnnnnnnnnnnnnnnnnnnnnnnnnnnnnnnnnnnnnnnnnnnnnnnnnnnnnnnnnnnnnnnnnnnnnnnnnnnnnnnnnnnnnnnnnnnnnnnnnnnnnnnnnnnnnnnnnnnnnnnnnnnnnnnnnnnnnnnnnnnnnnnnnnnnnnnnnnnnnnnnnnnnnnnnnnnnnnnnnnnnnnnnnnnnnnnnnnnnnnnnnnnnnnnnnnnnnnnnnnnnnnnnnnnnnnnnnnnnnnnnnnnnnnnnnnnnnnnnnnnnnnnnnnnnnnnnnnnnnnnnnnnnnnnnnnnnnnnnnnnnnnnnnnnnnnnnnnnnnnnnnnnnnnnnnnnnnnnnnnnnnnnnnnnnnnnnnnnnnnnnnnnnnnnnnnnnnnnnnnnnnnnnnnnnnnnnnnnnnnnnnnnnnnnnnnnnnnnnnnnnnnnnnnnnnnnnnnnnnnnnnnnnnnnnnnnnnnnnnnnnnnnnnnnnnnnnnnnnnnnnnnnnnnnnnnnnnnnnnnnnnnnnnnnnnnnnnnnnnnnnnnnnnnnnnnnnnnnnnnnnnnnnnnnnnnnnnnnnnnnnnnnnnnnnnnnnnnnnnnnnnnnnnnnnnnnnnnnnnnnnnnnnnnnnnnnnnnnnnnnnnnnnnnnnnnnnnnnnnnnnnnnnnnnnnnnnnnnnnnnnnnnnnnnnnnnnnnnnnnnnnnnnnnnnnnnnnnnnnnnnnnnnnnnnnnnnnnnnnnnnnnnnnnnnnnnnnnnnnnnnnnnnnnnnnnnnnnnnnnnnnnnnnnnnnnnnnnnnnnnnnnnnnnnnnnnnnnnnnnnnnnnnnnnnnnnnnnnnnnattcagggacctgttgagggtatatttgcggtgttgtggttggtttgtgtgttttctcaccatttcagtataccctcaacaagtccctgaatgaacacacctgcgtgacagtgactcgctcgcaggccgcacttcacgcagaacaaagaaaagacactgcgggcccgcaggcctcataataagcaccggattggcctgatcagagagccagaattgcctgcacgcgtgcaaggcacaaaatttgaaggaataaaagtcgatgtcctgtctacaatagaatgtcagaagcagactgcttatatacatgacccctgaacccccgaatcctccgaaagcccacttcctcacttatatcctcagccctatgaccgcaccccaaaccactattaactcgacttccagtataagtcttttttttttaatccagtagtaggccaagcgcaagctttgcaaatgagtgatcctagccgcgcaaggcttactattttttttagacaaatgtttaaatttaataatttttttggttttcatttatttttttaaaagtaattaaactaactttatataaacttattaatttaaataaaaaaaatttatattaaagtattattaaatggacattaacatagcttacatttttctataaaagttttgagaatatatttaaagacaatatatataaaaatgattttttttaaaagaaaatagaaaaaaaaagaattagacgaagatttgtagagtttcttgtgtttacatttgttgccttaattaccgtgcaagaataaggctatctccataatcgctgctgccaaacgtggaaacatcaacatatttagtggggaaaaaacctatcaccacacttaccgccgccaaaaatgaggatttcatgatactcgccgccgccaaaagtgaagctatttcccgcacttgcggccgcgagaaaaaaatcatcttaatgcatatgcatctaaagagtattcttaaaatgcatatacgactaaagagacagcaagaagcataaactcatctccaaactcaccgtcgcggaaactgaatccatcgctatactcactattaccaaaagtgagtctattattccatcaactgttataagttaaaaatcaataccctcgtcgctgccgaaagtgaggttgtcattacactcgctgccgccaaaagtgaggtgatcatcacatttactgtcgcaagctaaaaatcgccactgtcgctgccatcgaaagtgaagctatcaccacattcgccgccgccaaaagagaggatgacatatctgccaggcctgccatgttcgtcatgttcgccatattcgccatgcttgcatgcttgtcatgtccgccatgttcgccatgcctgccatgcttgcctacctcccatacctcccatactcaccatatttaccagatttgccatgcttccatacttgccatgcttaccatacctcccatatttgccatattcactataattgccttgctcgccatgttggccatactctccatactctccatactctccatactctccatactctccatactctccacgctctccatgatctccatgcttcatgctcaccatgctcaccatgctcaccatgctcaccatgctcaccatgctcaccatactcatcgtgttcatcatgctcaccatgctcaccatactcatcgtgttcaccgtgttcaccgtgttcaccatggctgccatgcttgccatgttcatcatatttgccatttttgccatttttgccatcctcgccgtgttcaattgcacctcttcccacagccctcctgccgcccccagcacacttttcaggcccttgccaatcgcaatcaaacctgccagccattggcaggtggcctgcaatggcggcattgtgcgaaaacggcccataaacccccgcacttcgtcatcgtgaagcctgaaaacctcaacaccagccgttattggcgaagttttatgggatgaggttgcacaaagcgaggcgtctgatgtatttaaaccgaaaaaacgttttgtgcgatatttggcggccttcaccgggccggagggctaacatgcagccatttaggggcgagtgacggccggtgcctggggcagagagaccggatggaattgacggcgacgaggtcacccgcggggtgcggtccagtgaggcggtacggttgggaaatgcagtgggcgtgccctcttcctctccctcttcctctccctcttcctctctctcttcctcttcctcacacacacacacactctctccctctccccacacatccacacactccttcacacacacactccttcacacacacactccttcacacacacactccttcacacacacactccttcacacacacactccttcacacacacactccttcacacacacattctttcacacacgcaccccccggcttctcctctatcaggtgtgccccattgccgtcgttcccccctccctgtacgctctccactgtgccccggtctctctctccctctcactcgctggcaattcctggcacgtcgtggcgcaccagagccacagaaccacgccgctctcctcaaagaggtatgcgcccttccatcaccattgttcccctctccccggcgggccccagtgtctcctgaacgccggctccaattccccttcaattggcttcacatccccttcaatttgccctcaaaaccagcgtcaaatccccctccaaatggcagtcaacgggcgtgtaatttgacaccaattccctgcagttcaaccaacccacaagcctctctccccctcgtcgaacgaaacggccggggccctcgccatcatgggcagcgagggaacaaagcgtgagggggtcgggcaggtggccagagagaacgggggagggaatgccggcgatgcggtgacgattcccggcggcgacgtcggcaagagcgtggctcgcaagagccaccaacaacacatccggggccggcacgcccctctcctcggcccggcgacggtgcccttcccgcgtgtaaacgcgggcagccaggtggctcgcgagggccacctccgacacatccgtggccggcacgcgcccctcgacggcaccccggaggctctcgcgagcctcaccaagaaagctcccgcggaggcggcaaagggggaggtgaatggggaggtggccaacgccatgatttagggggatgtgtgggggtggttatgggtggtgtgtgctctttttttggcgcgttgatttgatatgtggctggcctataaaggcttgctatcagaggtgaactgggaacggtggaaatagcgttgattttggcgttcatatcgcgttgaatttgatattgtggagttcttttggcatgttgttgagcgtgagccctcctccatgtgggtgagcctcccctgtgtgggtgtgccttgccccgtgtgcgtgcctcctccatgtgcgtgtggcccctccagttatatcaaccccccatgtgtgtatgctgcctttatgtttgcgcccatgctttcttcatgtatgggccttctccacgtgtgtatgccgtccccatgtgtgtgcccatgccctctccatgtgcgtgtccgtgccttctttatgtgtgtgccatgtcctcttcatgtgtgtgaggccatgccctgtccatgtgtgtggccatgccgtctccatgtgtgcatgccctctccgtgagcatatgccgcctccagtgttcacgccttctccacgtgtattcccacgccttgcgaacgtgtgcgtgccgcctccatattggtgcccatgccttatccatgtgtatgtgccttcgcgtgggttccatgtgtcacaatcgataagatcacaatcgataagatcacaatcacaactgataaggactaatcgataaactcataattgatagtgccaactctagtagtagcatatagggatgcatattgagcaaagggatagagtccatatatatgcacataaagcaaatataaggtatgttcatcaagtgaaacaagctgaattcaacagtcatccaacccgctatcttgtcttgtgctatgctaaaacccgggaggcaggtttattccatgcccaatctctcaaagagagagagatatctgaaactgccctaagaatacacaatgaaggtctcaaacattgagttgttaatagcccgctccaggacagcacatcccagaatgccattacattgccaattgcttcacatccatcccctgatgaagcaagaaaataatccttccccacaagctatgcttgctattattgtgccagagctagaccaaaacctactctcactcccaccaggagagaggagcagaaactggtgctccgacggttgacagaagcggtaaggaacgcaagagatattatatctcgagggggtggcagcatcacacaatgaagtggtgcttggcctgccctcctcccagatcgacacacagaatctcgaaccagtcgcgaccccgggtctgggagggaagggcatcaggttgtgtgagagcttgagtgtgtatttcaacaaacagcatcaaacaaagtgagcgtacagcttttcattagtcattaatcatcatgtcctcaaaagtgagggacgcgaatgttaacgatagcgaataaagcctcgtgtttgtggtgtgtggagggatcctggctaggtgtgccgacctcatagcggatagaaatcaacgccaaggtcttattaaggcaacatccaacaagcaagtcctttgtcttccatcaaagaggtaaaaaaaaaaggcagcaagtctacccctagacattgggcgcgggcatttatcggcggacgacgatgccgttgcggcgggagctgcgctcaacgtactcttgctcgtcctcggaagaggagcacgagtcctcgtagccgcagcgagaaccgccgcagtcgagacggacgcgctcacccttgcgggtgatgccgtagcgctcgcaggtgcacgaggagcagtctgaggatggggtgctgtagccggacgacgacgaggagttgtcggagcggtacgagagcgaggagccgacagaggagacgggagagacggaagcgccaaagtcggtgatgatgtcctcggcgtcgtagtcgtagatgccggtggcagcaaagtggctggagagctcatcctcgtcaaagtcgccgtccaagatgtggcgggtagcgtggggagctacgggcttgggggccttgatctgggacatggagagagggcgacccttggggatgtcggagctgacggagtggcgcgaggaagacttgcgggaagaggacttgctggaagaggaagacttggaggaagacttggggacgtcaaggatgttgagggcacggccggtggtgggctcaacggtggactcctcggaggggttgtgcgagacgtggtacccatcgatcatgtagtagtaccagtatctttggccgacttgaagtgtggtgggctggaagcggaaggtacccttccatgtgccggacttggaggaagtcttgtccttggagagcgggagttggccggagtagttgtcccaggagccgaggagatggacggtcttgacaccggaggaaacacggaggttgaatgaaagctgaatggcggacattttgaatgtgaggctgaaataaacacgagatgctgataattaaaccgtcccgagagaaaatagcttcgcgctgtagggcgaggcgagcaagtaaaccagtagttgtttttgagggtattcggaggtggcgattaggaagtagctaggaccagcaaagctacaatattttgatttttttgtgtattagttgaattaacagagcacagctccgtgtagagggggagggtaaagaaagggggaggaggggaaaaaacaaaaaccggtttattgtttttgagggcttgctgaagaagagaagaaggacaggaaaagagggtgaggccagagccttatatcatctggcgccgagttggacgagagaggcacaaccaagggaggatgggcgggacaagaagccatcggcccagtttgagagaccacagcatggggcgcatggccctcagcgagcactacagattgccggccgaggtggtgatggagggccgaagccaatgagagagaggattggcggatagaggcagggccatgcctgctgctgtgttcacagtcgatatcacccagctcgcagagtgctactgcactgtgggcggctaacaccagcgggacgttgtcggtggtgatgggaatcttttttgggaaactcacaagagagacagagaacatgagagacaggaaatgccccgcacttgtcaatcacccacgctagacagctttaggaatagtccggcgtctaaatcctggtcgtcattgaccaatcaggtgttacatttccagatcacacacagctcatgcggacgacggcagagtcagccaataatcgacactgtcgctacccgcaaacctgcgcggtgcatgatgcgggcgagcatctcatcatcaactctcaggacattttgtgagtggctgcccctttcgagaaccaaccgttggagcgagaggctggccttccatcgcaggatttacctccgagtcctaccccacgaagcattggcgctgatgtcaaggcaaatcaccatcttgatattccctctgtatgcatctcgctgcagcctgcaagcacggggacaatctttgcagtaggtggctgtcatcttgtggagagaggcggccgcggattgggccgataatctggcttctcacagttcacatgccgggtaaagtgctgagctgaaggtgcagttcaagatcgggctggaccatcaagaagcatgctggaagccgttgattctatggctctgggttctctcggacaattccaccatcgacaacgccgccacaacggcgcatcgcttcttggggaaggccatggaagccgactgccgacttcttggacacctctatccgatgtctggcttggtggatctgctcgcttgcgcttgtcgagctggtcgtccggtaaaagcgctcatcctcgcgtgtattgcgtatagtattcagacgaggagagctaatgcatgcaagcaatcagcttgccttctagctcagcagtagcagcctagcattggcgggtatgaggcatcatgatcacatctccacaggaaggacggtggattcctggacgtaagaatgtgatatcgagctgcaagagacgatgtgccaatggcttgccgtgcacataatagccgcctcagctctgcatgggttggtccgtacacccatcccggttcactcattacttcacctacctttaacttatttagaaatggggttatagacaccagaagctcggaaaaggctaggattacaaacacggaaagctcagactgtgtctataatcctagccttttctgtgtatagtctgagctatgatattttattcctggctttgtctgcgtatgatctgagcattctaaagacaagtttgggtcatagcaagctcaggttgaaagaagaaagcttggaatacttttagaataaaaggcttatttaccttggataaaaaagagctgtaaattcgggctgcaggtagttttattctcattattgaaaggccatcaacatttgctgaagtatcgtcaaggtaaatctcttgagccgagggccttacctagattactgagagtgaagctatcgccatgagtttataatatgagctgtatgaggctataatctgagctgtatgaggctacaaactgagcaatatagtttaaacaataggatagagtccaagctacctctatcgacatctggtaattgatatctacagtcaaagctacatgccttatgtcaacattgtagtagaggaattcccatccaccttgcctacctgcttacccaggtatatcaacacacactaaacagatcccagctataaacggcaacttcactatacacactcttcaacgtttagtcacccatgcttgttgcgcgtcttgttccaagatatatagtcatccccaggcttcctaaaatgtattacttaacagaagattttgctggctaccttcgaagaagcaagctatgtgtggtgatgggtcatgcggttgaaccatgacggctcgcaacactgctcaccactacatgatttttctacataatgacccaccgcatctccctctaccacaatagtctcactccccacataactccccacccacatagctactcccccatgtctcaccacacccacccgcatatctcctagctctgacatccaccacgtgtggcagcatcatatctacaataatacccggtaaaaatgtataagagctacagctatcatgtctaaaaacaacatttacagtcctagattaacttcaaaatgaaaatgcaaggctcagatcaagtctagatatatgacacacaaagtttggatcaagttcaaagtaacatgctaaaacttaggcaagtctagaaataaaatataccaaatctacctagataaactccaacatatgatacgaggctcaggttaagtcaaaaggaagatatataaagcttggattaagcgggaaaacaagagatttgaaacttggaaccagtctagtaataagacatacacagcttagataaggcttcgatcaagtccagagataagacgtaccaagcttagattaagtccataaatcagacacccaacgctcagatttagctcatattaagtccactataagcttggatcaaatggtcgagcaaaaaacgcctgaggatgactagatattcttaagtgcaggttgcatttgtctccgctttgggtcttctctcttcactgcctctgcttcctatcttccctacttcaacatctctctctttgagacctctgggtatcttttcaacgcttctctccatctctccaaacctctctgctttagcatccctttactgatcttctcaggtcactactctgcggtccattgtagccttcgttatccacagcaatgccttcttttaatgccgttgcctggatgcttaaacgcataaactcgatatcttgacggtgtaatccattgatattcatatcgtgcgcttccttggtatcttctcttcaagccacttgcttataactgatcgtttccgctgatgttacacgcatgctcgcaagttagggagacttatgagtgcctttcgctgatccatatctcattttaccgctctgtgacactacctacatttcatttccacactctactgtctaccaccacccgggaacccacccgctcctggaggagggaaaggcgggaactgccctcccggcggtgggaatggcataccacccggtggagggaaagcccctggagggggcaccgctccgtttggtggtgggaaaggtggcatgccgccaccaggaggaggcgggaaagcagcaccagctcctccaggtgggaaaggtggaagcgggaaaggaggtgccccgccggcaggggaagctgaatttggcgcacctgggaaggggaatggcggcggaaatggaggggcgttggcaccacctggggcgccagggaacggaggtgggaacggaggagcgcctggtgcaccggggaaggcaccggggaagcctgggggtggcatgcctgggaagcctgcgccgggaggagggaaggggttggagccgaatccgccgggttgattttgtggcagcatggggttggcgtgggcttggccttcggcggcgtaggagttggtgatggagtcgatgacggactgggccttttcgtgaccgatttctgtgaggagcggttagccaagaacggcggcagagcaggcaacagagagacttacgttggtagtaatcgacaacgttgcggagatggttgcgaccgctgttgtgggccttgcgcacgctcatggagtcgtgcgtgaggtagacatcgcaataatcgcaaaagactggagagtgtgttagcagcgtctcgatgtttgcccacggtaaacgtacattttggcattttgccggtgttgtggctatgcgccgatgatttcggatgtagttttgatcaaaaaaggagaggttgatcggaaagctgctttgcgctcgtggttgtgggtggaaatcgatggtggtgtagtggttgatggtcgcggtgcagtggatgttcaaggaaacagttccagtttcgcgaggctgagaaatctggacgcggactgtgagcaggggttgggcgcaagcccgagtggaggccaagcaaggctgatccacaaaagctttttctctggagactgggcttctgattggctgcatggccacggtacccttgctctgggctccaagggggaaggcgacagattgccattttatcgaagctccggtggaacgtgcagcgcccccccgttgtgccagctgtattgacttgaactcaccaccgacgacgccaacatcttcatctccctccttgccgacaacagctcactcgatatactcagacacacagacaatggttcacgcacggtcggtgctgcagaatgtctgcagcgcgctgctcctgctggcagtgggcaccgaggccctgaagttcgacatccaggcgggcagcggacacgacagtctttcgaggagatgcattcggaactttgtcgccaaggacatgttggtggtggttacggctattgtggatggatacaagggcgatggcatgcaactgaacatgcacattatggacgcggcagggaacgagtacggcaagcccaaggacattgctggcgagcaacgcaccgttttcacctcccacgccgacgctgctttcgacgtgtgctttgagaacatcctcacagggagtgcgtcaaccaacctctggtcctcagggaccccgctaactcttgaccaacagacaaatacgtccagaaccccaaccgtcacgtcgagctcgacattgacattggtgccgacgccaaggactgggctgccgtccaggccagcgagaagctgaagcccgtagaaaccgagctgcgcagaatcgaggagatggtgggcgagattgtcagcgagatggactacctccgccaccgcgagcagaagctcagagacaccaacgagagcaccaacaaccgtgtgaagtggtttggtttcctcacaacattcttgctggttgggttgtgggcctggcaaatcatgtacctgcgggcgtacttcaggtgtgtctcccctgaattttgcttaatttggaagcaatcgctaacactatggtgtgcaggtcgaagcatcttatttaatgaactaccggggattggggccgggctgctggactcgttggctttttacatggagaaactaaggagtttaaactactactacttattattgaacaaggcggcgcgggcgagcacggaattatgacatatcgtacctagtgtatatggatctcaaggcgggatattttttttggggggggaagagggggggggcagggaaaattgatgcattgaatgtacagtatcaatgtgtgtgtatgattgatgtcttttctgatcccaaacaaaagtgttgtaaaaagaataaaataatacaaacaaggtaaacatagaccggcaagacccggcagacgggacggagcttgatgacacagcagctttcggcctcggcagtcgatcacccgccaagctaacttttggtcggtccgggtccggtctacaacggtcttttttgccgtcgtcattgttgcctctttgacttttgatatttcagcaaaaatcaccctctcgtcgacattcaattgttaacagcaaccccccacatcacgatggcctccctccgtccagcaacccgcgccctccgcgccgccatccgtcccaccacttcagtcctcagaaccgcccgccccttcagctcgtccaagtcctcccccgacccgggctccctcccaaaccacgaactcgatgtcggcgagctccagggcgcaaagttcaagattgagcctttgcgtagagtaggcgaagagccagacgtcatgcgcgcccgtcttctctgttcgtcatccccccatcccccccatccccccatcccctcctcccccttcacctttctctaacaatcaccagaccaatcccgcaaacgcggcaccctcgaatccgacctcctcctctccaccttcgccgcctcccacctccccaagatgacccccgcccaactctccgaatacgaccgcttcctcgacgaaaacgactgggacatttactactgggccacccagcccaacgtctcccttccctccggccaaaccccccccttggaggacagagcagtgcacgagtccccccgacccggggagtgggcgcagacggtggggacgttcaagcccgcgtaccggcctgtgcccaagaggtgggaggggagtgagattctggctttgttgagggagcatgtccgggttaggaggggtgatcaatcggagcaggtgaaggaggagctggggcatcatggggaggaggggcacaggcataacgaggtggagacgaaggggatgccgtttatccctcccctcgatcagtccagctcaaaggcgtacgtccaatcttggggagacgggggggggtggggggtgaggggccccctgtttgggtgtaaaacaaaccgaaataaagaaggaggataaaatgtaacagtatgggttgtaagatcacgtctggatatgcaggaatgggtaccactcccgaaaacggcagtggtataatcggttggttgcgtttgagctctaagatatggtctacacatacccccaaccttctctacgaaaaagaacgtgcatttaaaaatggaggacatggtataccatcaaggtgggaagacgtcagtcagtcagctagcagcgcaaaaggggcatcaagaactgcagcaggctccaaagagaaccaaccctgacccgacagttcatcccaattgactgacgttgccatggataatttcaggggcatttgacatatccagctcagttttatcgacatatccagacggtagataggctggctgggttcaccaaacagtatatatacctcacataacgcagacacgtccaaaaccagctcaactctttcctctctctctctcttcttaaatttaaacatcaccccacaaaacaccacaaccactttcccccccatatgcaaaggtaaattgacatgcttatttcccttcccccccacccctttccccgaaacacgcaatgcgaaaaagggtcaagtaacaccaaccaacaccacctagcttaaaaaacaacaaaaaagcagcgggatatctctcagagaacaataaaacagacccccccttagtttggcccccccaccagaaacgcccaagtaacccccttccttctcccctcaaaaaaaaaacccagttttaaataaaagaacaagtcattatcgttcttccccctcctcctcctcctcctcctcctcccgtttgactcggacatcctcaaaaggaacctaccccccctcaggcaatatcctccccaaactcctcagcacctcccaaacccccaccccccgtgtccccaccctttccttctccctctcctcccgttccctcaacctctccgcccccaacctcaaaacctgatccgcctcccgccccgcagtctcaactctcatgtcaaacttgtgaaccctgtccgccagcacatcaacctcaaactcgagctcctgatgcacattctgcagccttgacctgacctgcctcttccagctgccaaaactcgtctccggactagtcaggaaagccaacattttcgtttcttcctccgacaacaaactggggtctggcaacggggcttttctcgggtcgggttgcgggggagcgtcagggttgtctggtgggggggctgagagggggtatatcgggtcgagtgtgggtaatggtttcgcgatggcctgccaggcttttttgacttcttttaatctacatcaccacagttagtcttctcttggggataacggaaatgagggggtgggggggaaacaaacctttttatcctctcctccatctcctcaatcttcctgtcataatcctcattcctcgggttcggcttcaacaccaccggctgcttcggcgcttcttcccgtgagaaccaatctgaaaactccgacactgaggaaaagtccttcaagatctggtcttgtatcgctctcgctataattccacattagcatccccaattccatacatatttccaaagaaagaaaactcacctcccaaaacagcactattccccttcccccccctaggcttctcactaagcgccctctccccgcaccaaatcaacaactgcttcatcctcctcggctcgctcaacccctcggccgaaatatacttgtagaaatccttcggatcaacctcccgatgtggtaacgcgctctgcccattatcaatcaacgagctcgccctcctccctctcatgcccagtgaactcctcctccctccagacgctccccccttttttcgaaactctttattcctgttttgaataggcgtgtcgctgaaaggtagggagatcatctgtgaagcggcgccagaggggtgttctgcttggggtgtgccgttggtcatagggtggtcatgatcacggtggtggttgtgtcgctggtcctgtgctttatcctcttcctcctcctccggaatcccctctattaactgcctccgctgcgcttcctctcttgctttcttgtcggcattcgactccctccctttcctcctcgtcttcgccttgggcataaccggctcctcatcttgtaccggttgaggcgccgcctgagcagctgcactagacctccttttcgacgtcctcctcggtaaaacctgctgctgcggctgtactggtaacggcggtggaggcgcagactgttgcgccggagaggaagcgcgctttttcgaactattctttggtggtcttccaaccttcttcgcggtagacattttcggcaatggcaattccggctccggctctggctccggttctggctcaggtggtggtggtggtggtggtggtggtgctggcgtagtcttcaccctcttggacccgcgcgtaaacaaaaagtcgccatcctgctcgtcgtacactgccggggctcctgctgcggaggaacccttggagtcagcgtcattctttctctttttcctccccgtcgccggcgcaggcgcgtgttgttgttgttgtgaaaaggccgccgactcgttgataaccgcggcagccgcagcagtcctcttcctcctcttgaactccggctcttctggttctggcgacgacgtacccgcgaggcgtttactcttccgacgctcaggctggtggtggctcatgctcaagacttgtagcggctggcgggtccgtacgagagtagtcatggatgtcgatgatggcggggcgggcggcgcatcaagggcggcttgcttcttgttctgaacggaagaggaggggaactttgtgaagtcgtcgatttcttttttctttctcctccccttgcggtttcggtcggttggtgatgtttttgcgacgtggggcaaaattagaatcccgacaaggcaaaaaagtgtcggtttgggcgcgtcgtcgtcgtcggcggcaggaccaattccactcttgttcaattgatagtttgcgagatttggggcgggtgggcagaaagccaagcgggcggtcagacaagaacgcgtcgaaggtacgtcgctgagcgggcggccgaacccgatcaccccccaagttgtgtgtttcgcgttttatccaccaggggtggctccagctttcgagctccggttgccgtcttcgtcgtcgtcgtcgtcgggaggaggcgacgatatcgtgcaaatagtacactacagaatagtgatgctgtatcgggagtcgcgtaccggtcgtcaacgtcccaagtgggttgcttttgctgtcaatcgcgacgggaagctgcgcccgccggtttgtttacccgcagtccacactcagaattgcggctgccggagtgcacggaccaccccctttgctacgacgtcaactccatgcccccaccgccagcgaggccacaatttattgccgtcaaaactgatcgtgtgagctacatcagcggctggtaagtgatggcattgtcaagaatttacctttggggtacaatacgtgtttttggtagccctaagtgttttttcacccgcttcaaaacttccaccggttttgtcaaacgctcttagatggacgattcgagttacaagattatcacaatgcatacggagtaatccagaaaccaccttggacacacgaatgccatcatcttcgaacagagtaagtataatcttgaaggtttattgctcccttggctatgctaaccgatgtcctcattgctatcgcatggctcatttgacatccgtcccctggcatgagcgataactaactatcttgatataagaagctagatgcaaccaacctgccactccccctctaaaggacggagtgggcagccagcgagagaaaagatgaacaaaaacaaataccccatacataccagtacacccgttcatcgtcaaccatccgcccatctgcccagctttaggccgaggcatccaaaaatttccttgtccttgttcgcaaactggcaaagaccacgagaaaaggacaacaggccaccggcatgtccgtgccgtggtgcccatcgccttcagcccacgccgcgcaggccttttatcccgccaacgccctcataatcccacccaccaagaaagcgaagaaactaaagtatcgataaacagcaaatgaccccaaaggaaaaacgccaaaacgcccttttgatgtatacccatgttgttgctgattacatacagggcaagggaccgaggtgcctatcacccggtccctcaccataccggccgtgcgtgctgcccccatttcaggagacaagccccgcggcctattcactatacacccacgtttgcctccaaaattgacaagtcctcgacaaagtcatcaccgcccgccggggaaagatatgccgtatcaggcgggccatgaggaggggaaaatccaagaccatatgttgctgtgaacacttggactggtgacgatgccgaagctgtcgctatgcccggggctggcaacaatgccgcttccggattcgcagcgtttcgatcgttctatgagaaacggcgaccaccggtgtgggcagccatcaccggttggctgggcggcatcccaccagccatttggtaagcggccatctggggattgtattccagtggtggtggtgggatgtagcctgcgtggatgccttgttgttgctgttgttgttgatgttgcgactgtgttactgggcagtctttgtgcgcaagcaacaacgtcttcaggttaacaacttcttcgcgaaggacgctaatctggtgggtgaggttctcgttttcttgactgaactcctcaaccttgctttgaagattagccagccactgcttcttacgctgacgacacttgagtgcagcaaccctgtgttacactgttaatgttaccgtaacagacaaaaccaagacaaaagccaagcacatacctgttgcgctcaaggaaattcttcctcttctcctcgtctgtcatcttggtcttggtgccgtctttgttgatatgatgatcctcatcatcagagtgatcgtcatagtctggctgctgcgagggtggaggaccaccgtttgtcttggcttttttattggccggtcctttggcagcagggccatcatcggcctttctgcgagtgccagcagcactggtcgaccctctcttccccttggcacgggtcacgggacgcgcctgttcgctctcatcagacatggcgctgccagtctcactaacaccacgcgctgagcttcctccaatcgacgagttgccattcatctggggagaagtgttgatgggttggacagcgggagcaggttgatgattggaatgcacatgaacctgggcaggcggaactgccgtgtactgagacgggggtggaggctgtgtcccgttacgtgcctgggccaacatgtacaacccgttcgccgcgtcgttgtcgtgtgtatcataggaatttgtgggaggcttcacttcagccttcaagctcgacccattgctcatttcttggggcgcagaggtgacggcaggaggaggcggttgttggacctggatgggctcgcgcttggcctgaacactcagagcagtgcggtggaagtcaagcgtactaggggtttgcacgccggcagtaaggccagcaaagagagccgtgttgggacttggggccgggaacatagacccgctgcccccgggagtgagaccggtcctcagagaagactcgttgggggttgggaagccgcctcggatgtgatgagtatcactgaaataatcatttgtcggccccgacaacatggccggactgagagggcccgtcctgagggaacctggccagccgaagggagtagcacccgtgccgggaaggagtgacgacggcgaggtgagagccgcgacagatggaagcttagtccccccgggggtctcgggggcgccgccgccaaaggactgctcaaaggggttcggctcgaggctcaacaaagccgcgccgacgccgggggggttcgaaaagtagtcgggcgagttgttgccggcttgctgttgattgttctgctgctgattgggacggggcggaggcgcgagcggcttggtggcttccgcattggatgatgacgatggttcggtggtggtggtggcggtggcagacttcaaggggccgtcatttttggcgtcggattgcgtgtctgtttttttcaaaaaaaaaaaagtgtcggcaacgacattcgttcatcaagacaacgcagcagaaagatgccacttaccttgtcgcggtggggatgctttcttgctggactgtttgggcgacttggactcacctcggccagcggctccagtggacaaccccatgatgtcaatcaaaatcttgcggcgccttgctgctgcagctgtgcttgccttcgcggaaaaagactgagcaaaggggaaaagcgacgactatgaggtcacttggtctttcaaacccataaaaaagggctgcgacgctactctgcagcgctccaggacgctgtcggcttcgagaatagttacgtagtgtgtcgcgacgtggtgctttgcgtgcgggtgtgggtgtgtatgcggaaagagaaatgggacaagaccgggaatggggagcgacgtcaggtatgacgttgggggaggaagatggcgcaaggtgaaataaaaaataatggggtcgctaatgtgtggtccgggggcagcacccactgggtccgtgtccatgaaaggaagaaactctgtccgggcgggaccgctctcttgtcagttcagccaccaactgccttcgacactgcaactgtcttgcttctccaggtcagatatcttcgaggtgacaggttgcttcgctttctttttgcttttgaaaataccaaggcagtgagataatcgataatagaatagcctgaccaaagagacgagactgggcagtcctcggaatccattacaaagcaggttctcgcacgtcaacttccagactgccccctttttctgccccccacacacaccttgcgtgctttgcatgcccttcaaaaaatataccgaaccgcactttaagggaaagctagctaccgtgctacctacttttgcctctcccggtctttggagcgactcgctgaccgtaccgaggcgaggaacattagccatcatccccacgacccgcatgtcttgcagttatgatccagccatgcgtgaatatcagcggtgaggtgcccggtacctttttgattttttttctcatcacgaattactcttgataccactaacactcgataccaggtaacaaaaaaccgagcaaacctcgtgctgataaccatcatacggcttggagctggtcttgcataagtcctggccacagaaaaggacgtggtggagcggtggggcttctgcttcactgtgctcgcacggctcgaccgtgtctttgacttcgcgtgaggattccacccttggcactgcacctccggcagaagaggaaaggaaagcacgcaacaggtgcccgttccagcgagcagtcttcaaattgccattctgctcagacctttgttttgacaatgtccgtttttgccatgtttcccatatctccgggatggatatatctcttttcgatgatcttgtcaaacctcggattcttttacgcctactcattcttgtcagtcggtcttgtcgtgtcaaacacagcagaactcgacaggcccgagatgctggtccaatgaactggtctcttcgatcgatccttctccttcaggccttgcggtgtcgatcaaaggtctagatgctttggccggcagccggggaagatgcccggcacgaccagttttcaccagatatccaaatattcggccatgtctgccgagcgcttccagcgttcgagacccggctgtgcgggcataaccatgtcatttctgaccggaaaagacggccggagatggtgtgtggttaacagaacggaagcaacagcaaccagcaaccagcaaatcaatacaatccttcgccaacggtgaggtgacagagaatccaaagaatggcatggatggaaccatctcaaaggtcggaacaaattgagggaggtggggcatttgtggcgaattggttgtttctgtcgaataacctgccagcgtttgctttctcccctcatcaggcaaggtccccgccctttggtttggtgccgggctgcaaatggaggaacattgcgtcaggcgctatggaccggtgcaatctggcgggattgaagattcccccagtgttctttttccccactgctcaaccagcatgctgccagcattccctggccgccgagtttttgcatttctctctcgcttttctgaatctcttcttcctcgagaagaagctgcaagagagagttcatcgagatctcggaagacgatcgacatcccctccaggtgccagacgggatcggttggctgacgctcttttgcgttgtcggaccacaaaggaaacggacagggatgccagtgggtgtccgaccgtttctcccagcgatgacgtaactttgaggttggaatgttgtctcaagccatgttactcggccattgcccgcactgtgggatcaagtctctccgtctcccaccattttgccgtttccatctgctctttcgagtcgttgtgctcacacttgaattccttccgtctccctcagcgactgcccgcacccgaactctttccattgttcttcacccagtgatgacttttctcgtgctggaatgtgtagggaaagagtcgcgtgctgacatcaccatgccacggcaaagctgacccctatgacgcacttgacagccggctgcacaatggaaaacacaaggcgccacctggctcgcgcagtcaagaggcacgggcgggttccactagtcaaccacacaaccaggtttgcagaagacgcgcccaatggctgaagagaacatttcagcgaaaattcgagaacggggccttgcacttgcagccagaagcaagcaccattacacagcaggaccaagctctgcaaccatcctcttttcgcttaaccaccttccgaacaacctttcccacgctcaacacgttccaggaagattcccaccagagaggagggccacagggccctgaaaaaagctgtggacagccctgggattccccggacggctgatgatatcgctaacctttttcaggccatcacggcaacaaaccattggcggttgacatagcacctgtgggtgaaggcagcattggagacaacggccggctccccgaggtgcagtagcgcactcactgtgcgcgtcccttggtccttattttccgctgccaacgcatgaccttttttgatattggcgtggggagaggacagtgtgttttcaccttcaattgaccagatcttgaatttgctggtgaggctggcggacttgtggcggcgccaacactcgtcatacaagagcctgataaggactggtaagcgtatctagacgttgtacagtacttcagtaaactttatggcgagccgatcacaggtatattctcggaatggcgttaaaaacttccgtcaggtaccatcgatgggcgtgggggaccgacaaaagacaagcttgtttgcttgacatgatcgatccatgtcaccctgtcaagatccggggtacagagagccgcctacgtaagatctgatatctttgaatatcaatatcaacttcactccatggtattgtacattactcttacatttacaggttgtcgtcgtcgtcgtagtaagtacaacgcaggcataagcaacgagcgagctacttcgtagtaactgctagcgccgtccacaaactagtggaggtgaggcactgtggctgcccaatattgccagcacatgcaagagatcacgagatctcgtccatgagacgcccaacacgctaggtggtcctgaagtcgaagtctatggagccacgagtatgtatttgtctagtcccagcattctaatttcacaaccttagctttcactatttagaatcccagctttaattgtccaatatcccagctcttcactgtccaaaatcccagctttttactgtacaaaatcccagcttcttatgggatatcctctatgggcacccttatatatagacacttcctccatgtgcattattaactttcatttatgcacctctctcccattatctcatgtgcaccccccatattatagccctggcccatagagagggttatccgtccaaactgtccaccacggtactcttgaaagctctagaagcaaccttttgcagtgatgctttgagcgtgcccgtggagcaagtccctatgctatatgttgtgtgccatgtgtgccatgctctccatgctggaagtttctcggtccgggctcttcctacgctaccacaacaccactcaccatggcaacaacggcaacaactggatgacagctaccacagcaacattactactgatccaagcctgcatgcttgctcttcctcttccctctgcaacttacttttgcctaggcacacatcctgcgtcgtagataggatcattacaacacggcttattagaattaacacaatgacaatgacgagatacctaggtattatgacggcattggttatttactattttacataaaaccactcacaaagcatgaagatacttagtccaagctttatacagatttgatcttagcaaccgtttcttatgatcctggctcttactgtcgaagatcccatcttgcacaatctaaaatcccaggtttgacaatatgcgttctcagcttcttgttaaaacgaggctctataaagttatagtggatgaaaatggatagagaatatattggaggatattctatctaagcttatatttatctcatctcagtatttgtctcttacagccttggcttttactatctaagttgctggcttttgatgtctaaaccccagcttttgttattcaaaatccgaggttgctccaaacgtggcattctcaacaacagaactgtacatcaagctcgcccactttgatcgaaagaaagcccatatcacagattcatcctatcacaaagcaccgacttgaaacatcaaacacaacgctctaaaaagcagtcatcgcccttcttttccctctacaagctcggccgtcccttcacccccaaaaccctaaaccccaacctcggcgcatgcaccctaacccccttctcattctcccacaccacctccctctcgtccacccccactaacctccccctatccttgaacgcgctccccgtatcagtaggaaaaacctccaccacatcccccttcttcagtccctgaaccttgaccaccggatcagcctcatccaccccgatatccccccctctcttccccttcaaaatcagctcagccgcttccccacccttgatgaccctcccttccttcccactcagcgcattgataaactggtcaaacctattcacccacgccatcgtcttcgggtagcgcgtcttgtttatgacagcagggtcaagagcattgtcgttgtgaggagggggaagggtcaaaagccagtggatgacccacaccccttccacatctgcgcgtgtgggctccttcccgccgaggacccagttcctgccatcgctgaggatggtctcttctagtaaacggactgaggattggatttcaaggagggcttccgcccgggaaagggcgcggtcttctttcgtgcggggtgcggcgaaggctgcgggagagaaggtggcgcggtctctcaggaatttggggtctttcatcacggggagggaggaggggaggagctcggcggctttgaagaagagggttgtggcggttgtgagggtggagaggaggtgggtgatggttttttggtctgctgtgagggggggaggggggaagagggtgtcgaggaggttgaggatgaggcgggtgtcgaggtagaggtcgccgccgtgggcgaggagggggatgcggcggtagttgagggagaggtgggttgataggtcggggcgggggaggatggggggttggagcttttgcgaaaatgttagcgtttggatggtgagaatgtgatggaatgaggccgactcgactcacgcattgacagtatggaattcccctgatcttgagataccaaatcagtcttctcgcataaggcgagaaggggtaatgatacagaatgagaggttggtctgccattgtgagaaagttatgagagcaacacttgcacaaacaacaggaaggatgcagagaagcagacgctgaacaggtgagtgaggctcaattcatatattcatacattccctatatcgattacaaacctcggttcatccggatgtcgtttggttcacggagccctgcgatggtggttcggcctcggcccggggtaaggtgcgcgttgacatgcggggttacggggtagctcccgccgttggggcaaaaagtctaggcctacggcaccagaggagcacgggccttgtcttgctcagttggctcccttgtgattctacctcttacatggatagtacacttgatggacagtgcaagctgaactagatagcatctgccgaaaggcacggatgcacagtgactcgtatctgcacacgtagactaaactcaaggcaaatacagatgaaaataacgtgacaagagataaaaactattattccctccatgctggccggctatccatctaataacgtatcctaacaacacactataataaaaatatcctttccagaaaatagactggtatatccctctctttttgttttgatgacgataatgacaatgacaaatcccagatgtaaatgcaaaacccaaacccccaaaagccattttccctgtatctcataccccccctattcaccatcttacacttcacccccatcactcactcaaaccacactcccaacagcaatactcctcttccccctccaccccctaaaccgtcccatcaacccccccttcctcctcctgttccccttctttttacttcccctttccttctcctgcttatcataccccccctgcccaccaccaccctcctgcctgaccctctgcaccaaccaaacattataaaccccaaacaacaaccccccaaccaccatctccaccgcctccaaaatcccagcaatgatcgcctgcgtggaccactccccattctgcacagcataaacccccaccaccgtcccaaccagcccaaccatgctgtacatcacaagcggcaagtacaacttgttcagcaaccagacataattcctcctccacttcaaccccagccacgccgtcccaaaagttccgatgataataaacacaaagcctaccaccatcgttgccgtgttcgccctggtgagaagaagtttcttgtccggggtggtgtttgcgcctaggttgatgggtatagcgcttttagggtccaacggggggcgggagagggccgtgaacgaccccgggatgatcacgtagccggctagaagaagaaaaagaaaaagggtggagaggatgttgtgcaggcgggggattttgtccagagacagcaggatggacatgtaaggtgtttgtggggcctgggtgttgtacagtggtttggagtaggacaggtccgtgttttttcttgttggcggggagaaggaagaggatggttggacggttgggtttaacgggcgggtggatgttgccgttgcggaggaggcgactgagtcgagggagctggagtgcgagtgttggttgtaggctggcttggggggagtgcctccgacggcgcggggctgataggggggggagacgacggcccgaggcatggtgggatagcggccgccgtcttggtttgacgaaggggaggtgatgttgcgggagaggtaaccgccctggggcggggaggttactcttggtgggctgacgatgccggaccgggaggggccagcaggataggtgttgttgatgtttcgggaagagctggtgatgttgagaggggcgatttcttttcgttgaggaggagcggcgagggctggtctttggggaggggctgatgggttttgagagaaaagaccaacaggtatgccgccttctgctacttgagggttgggtggcgattgcctcaaggggttaatggtttgttgagaaaggttggaagacatgactggcttctggggtgggttaggaggcgattgcctcaaggggttcatgtcaatgttgttgcgagagaagccggccggcaagcttgagtcggcaggagggggcggggggtttggtggtgatgaccgaagagggttcatcaacatttggtgtggcggtgaattgaccggctttcgagagaacgagccagtggaagggggtagaggttttgagggagaaacaacattgcgggagcgactagtctctgccgagacgtggggattgtacgtggcctgaggtaaggcgctctgcggtgaaaccaaacggtcagaggtttgcgaaaatcccccggcggacacggaggtttgccgtggaggaggattgggcgtgaggtttgcggtgcggagcggcgggggataggctgggtttctttcctgtggcatattgcgccttgcctgtgcctgctcaaacgattgcaccggggccattgcttgttgacgagtcggtcgtagaaccaccggcacagcttgctcaactcgagaagattgaacttgtccggaccgcgatgaagttgggaccgggggcaccggtcctcgcgggacaggaagggcttctgccgggatcggcggcccctgacgagacgggccttgcaccgcggccacgggggcagacggtaatgggcctcgaggcggtcctcgacgactagctgtttgatttgcttggatctctgcttgaggaggttcttctttcaccgctggtttcgggaaagagaagttgggtgcaccttgatctggactgacttggtttctggcggaagctggaggcccttgattgagtttgcgttgttgggtacttaaagctgctggacgttctggtgcactttcggtaggctctctgcgtgaagaaaagcttgcctctgtcacactctcagcagtacgccctggagctggttgacgactgctcccctgcgtcgaaggttggcgaggcatccctctcttgggaccggccgaccgctttcttcctctgacagccgtactttcttgccccctcgccgtcctgggaagccggccatcttcttcggtggatgctggcaccatagattgctgttgctgttgttgaggtctctgttgccgtgaaggtgctctccgtgggcctccttgagctgttgatgattctcctgcttcgtcacccccaggaactggttttcgagatacgcttccctttgcgacctgctgttgcccttgctttggcacacgaggggcccctgctgaagacatgttgaagaatcgcagtgagtatatctctcaagggaggcagtcgtaatcacgggcgagcaagcaagatgaggtgaggtaagtctagaccttgatgaagcaagggcggccagggaagggatatacggcattatattggaactggaaatactacacacaagtcgtcgaaacacatgatcggcctgtgatgaccctcctgaaagaccgggtcggaaacatgtcgttggaagttgggaggctcccgggaacacagcagccaaatgagatgagcaagccactgggctcttcccccacggtccgggtcaaggccggtgagccccccataaagaaaattcgaaggagcttggaatagaaatctgaagtctgccgtgcgagtctggtcattatgggtgccgaccgacggccggtgtccaacccggttggccgggtccgaaacagaacaaaaagaacgcttgaaggcggcgcgggagaagtgatcactctgtttttggtgctggtcgagccggtccagccgaccactgaaactgagaggcacagctgggccaactgccgttcatgcattgccagaaaacataaagacggccaaggcactctcttcaatgtcgacttcgacctggccatcactggtcatgaattctgctcaaatgttattagtcgctccataaagaaaactggaaccaggttgcttggctgcaacaataacaacagtcgagtagagcaggatgccgagatacggatagtccaggttcatagaagataacaacaataagaaggttttattcactcctatttttgaatcaattgacggctcacaagtgtaaagagcaacctgcgacctcgactgcgacttgcgataaaagtgacaagactgagaaatagataatctgatgttcgcatcgctcctcctctggctctggttgtcagttatcggagcatcgaggcctaaaccaatcagagagctggagacttcaggcaggcagccccaccatggacacccaggatatgctccagccaatcagacggcgagcggcagacgtccgtcaaaatttggctccacgatagcggtgccatcgaactcgataggtaggcgcattccttgtgaccgctgtggttctcaactcctgtcaggtcaacccaaaaaaaaagtcccagctgttgcccgctgcagtggcatcccgaccaccctcactttgctcgtatgaagccggcgaaggagcttgtgtccacagcaagcgatgaattcgtctgtgatggactccaaccagccagctcagccaaaagacgctgccatgtcggccaacgcccccctcgacctcgacgcgcagagcccaccgcgccctcctttttctccattgaccgaagccgcaacggactcgggcacccgcgaaccttcagttaacccgggcgccacgctcgaccaggacgagcaacaagacaaaaatgcgtccgcttcagccaccgccgacgctaacccgtcactatcttccgcgctcgtcaactctaactccagctccaacttcaactccaactcttccaactccaacctttcccatctcaacgtctcccagatcaacggcgcttcagcaatggacaatgtcaccatggatatgggctttgatgccggcatggacatgtacgggcagggcatcacgcctgctaccaacatcctcatggccatcgcccgcagttatacacagacccaacagcagcagcagcagcaccagcaacagcaccagcggcgacaatctcaactgccctctaccattcaccccgcccaggtctcacgaactcacagtgcgcttgatgttcccgatgcgttgatggcgatccccgaaccttctcgagccccgccgcctgtcgagccccggctggagtcgtttgccaggattgagtttgccgacagtgtgttccagatgaccacctatgctgtcgtgatcggccgtgacgtacgggcgctggaactagcaaggaagcaagaaaaggaggatgaggcctggaggcagattgtcgatcagtatgcgagacaaggtcttccgccccccccacggccagagctcaatcgtcgaaagtttacgagatcatatgtcagcgaagaaggtggcatgctggggccggaatccgaggacgaggagtatgtccggcccgcaaagcgtaggagagttagtgttgcgaattcggcatccggcgactcgtccatggcgcaacaggaagctgccatagccgccgagcaagccgcgctgaacgacaagagccttgctgccaaccgccaatacgtctggcacacccccggttcggcatctgtcaatctcaatgctctaagaccgtccccatataccgttcccttcatcggcattcactcgcccgggccagacatcgccaagaagacaaaggggatttcaagacagcacttgagaattgagtacgatcaaaacgaaggcgtcttcaaagcgtacccattacatagaaatggcatctttattgatgataaatttcacaaagacgaaggcgtcacgctgaggagcggcaatcgtatccagattaaagaggtcgagtttaaattcatcatcaacggcgttgccgagggcaagactggtgcggaggaggagccgcagcaggaggcacccgcagcagtcaatcggcgctactcagagggtggcaaggagatgagttttgattttgagagctcccacgacgcagaaaaggggagcaccagcccggaggaagtgccagtggaggcagcaaaggagagtagcgaaagtgagctgtcggatctggatgaagaaatgcccgatgcaggggagccggaagacgccgagggcgaggaggaccaggaagtcatggagaccattgagcaggatgccgaagaacaactcagccacatcaagcctgaagatatgacgcccgagatgcttgctgctttgccattgcttccacccaagaagcgtggacctggcaggcctcccaagaacggcattatgtccaagagagaggaaagattgcgaaagaaggcggctatggagcttgcaaagaaaaacatgccgccaccaacacccggcgaaccaccaataaagcgcaaggttggtcggccacgaaaacatcctctcccggaaaacacgccagaccggccagagaagcgcaaatacaagccacgcaaatcaaagaacggcgaggaaggcgagatgtcggagacggaaaagacgctcgagaagcgaaggcgcgaaaagcccaagacgcctcctctggagctgaacagggcagattacacagaggagcagctgcaaaagcccaacaagaattacggcattctcatcgacgaggtcttgtccgcagccccacccgatgggctgactctcaagcagatctacaagcgcatccagatgaagtatcccttctactatttcacagtagacaccaagggctgggagagcagtgttcggcacaatcttattggcaatgttgccttcaagaagaacgaggaaacccacttgtgggcccgggtacctgggattgacatcgatgctggcaagaagcggaaagccgcgtctccggatcattccacgtcgattcattcatttggccagcactatcaaccaaccgcagctcctcaggtgcagctgtttcactcggaggctggtgcgcagcaagggtaccggcctggtgctgggcctcctccacgtcctgggtatccggctgctcaaagtcagatgaatctcggccagcatcctcatcagcagctctcggcgcagcccgtcggcgttggtgctcaacaagccctccaccagccctatcagagcacggctcaagggaacggtatcccccaaatggccgatcaaggggcagcccaaggttcccgtcccatacccgccaacccgcaagcgacggcctattcgtcaccgtacgcatcaaggccccctccatcggcttcgcctcaggctggcaatgtgccacagagtgctcaaaggcaacagcttccgcatcaaaacggagcagctccgcacaacggtgtgcctcagcccaacaatgcgtctccgcaccctgcatcggcggcgggagtcaagccaggccaacctatcagtaccagcggaaccccagccccgatcaagccttctatccacccaaggctcgtcgagattatccgaaactttaggaaaacagtcacttcgatcggtgcaattcgttctaatgtgggagatgcaggagaagctattgccatgtctgtgatcaaccgcggtctcgggttggccaaccagtctactacgccgacctacgagtctattgagaagattgttctcaacgtgtttgaatcccagacagccaagcagttggtcggttttgagattgcgccaaagctgattgagaggctagtctccttcaagaggcagatgatcaacactttgaaggataagatgaagcccctggaggcggagcagttggtgctgtcagccatcgaccgcgttctcggttttgcggacaagagcatcatgcagggaaccgatgcacagaagacatcctacgagctcgcagagggtgttttgatgccagcggtgcaacgcgagattgctgcccatgacaaggaagcagctgctgcctccatgccgcctacccccacgccagccccttcacaggtgcggacgcctgcgcaaatgccggcgccgggtaaacatccctcgactccgcactcgactgcagcacaccagtccgccactgctgcgcgccccggctccgttccggcggcccaaacccctgtgcagatgcagattcaacccccaaggccagtctacactccggcacagcaagcccacatggcacagcagcagccccgagcaactgtagggcaacctgcgcctgctgggacttcgaatgggaacccgatcaatgcacaatatatgaatcagaatgcggtctctggctctggtgctgggcccgccggcgcgcggcctgttgatcaagttgcacctgcacctcagtcccaagttgctccggcaccggtcgcccagggtgacaccccggcgagatctcaagcttcagcgggctctgctactagctcgaaccagaacagaccacagtcacacgggatgccggttcaggcgtatccccatctccaggcagcgcaggctcaatatcggacacaggcctcaacacaatctcagcagcagaatcccgcggcggctcagcagcagaaccaacagccacgggttcagccaggacaggcacagcaagcaccgagctactcagtacagaaccagcagccacagcaacaggcgcagaatcaacaggcagctcaacagattcagaaccgtccacctcagagcccggcaccaaccccagcccggatccaagggcagagtcacccagttcacgctcggccagcgcagggcgggcaatctcctcttcaagttcagagtcaaattcagggccaagttcaagggcaagtccagggccagagtcaggggcaaaaaccggttccaggacaggggcaggctcagagccaggcaccaaatcagcagacaccggttcagcagacccagggacagtaccagcctcgtccacaggttgcggtttcagctcagcaggttcagcaacacgcgcaacagccctcaccacagcaggcccagcagcaggcgctacagcagacacaacaacatgctcaacagcagcctcgtactcagccaacacaggcccaaccggttcaagcttaccaaacccaggcgcagcaagcccgtgttcagcaacagccgactccccagcagacagctcgacaacaaccagtccagcagcagcctattcagcaagttgctcaaccgtccgtccagccgtctcacattcagcaagcccatgtccaacagccacaggctcagcatgcccaagcttcgccgacacaagctcaacagcctccgacgcagcagatccaggctcagcaaccgcttgtgcagcaagcttatgctcagagctcctatgccaggcccactactccggctcaggctgctcaaatgtcgcgggcccaagctcgcccacaagtgcagccccagggtcccgtccaggctccaagtcaagcttccggtgcatcgccggccccttctccagcacaaaagcctgtgccaggcccagctcaggtgtcagcccctcgagttccttcgcccaccacccaagctcacccaagtcaggctgcggtcccttccatccagaatgctgctccgcttcagaaccaaatgcctgctcagacccaagcatctgcccagcagcctttgtctaccactcaacctcaaccttcaaaaccttggggtccagcggtccctagcccacccgcggcccaatcgaacaagccatcccctcagctctcttcgcaggcggctccttctgctgcctccaaggtctcgatcccggctccgacagtcacggcgccatcagcatcaccaagtccaatccagcgtcttgctccaacgcccggcatgatccctctgccgccaaagcccccggctccggttgctacaccgccccctcaagcatctgctgcttctgcggattctatttctagtgctgctccagcttccagctcggcaacagcatacattcctccgccaccgacaccaacaccgccggcgacgtgattcttctttctagtttttgtttttggagtttaggcgtccaaaggacgactggttcagcaagcgtatgtccaaacaggtttgcaaggcttacctttatgggagaacagggggtataccaaggttatgcatagttatgggtgggataaaaggaatggttataatggcaactggctttgaaatatccgggggtgcgcaggacgtgcaggttttttattttacggttttgaagttgatatagtggtttttacgaggttggaggggtttgtaaaaggagagggcatgaatacagcgaggtgtatatgtggtatctacgagttgacagagaggagcgggtgaaattcacgtgatggttgttgtattctgagaataaatgctgaaagaattgcaaatgtgataacggatactgcccctgtgagattagtgtatgcccatctccttcaagggggttagggttatatgcggtccaattctgctgcccccactcttgatagcagcctcaattcatccatcattcagacaccttgatgggcccatcgactggcactcattcactcacttcacctgctcctcactttctctcaactcctcctcctcttatctttctcacaactttagcatagctcccattcccaccatcatcaatgtcccgcacaatctaagtcactagccaatcttttttttttttattcacaacaatggcagcgaaaccggggaattccctccccaaaaacctcctctcgtctccgttcctgggagaactcctcgctaaaaggtcggtgtatgtcaaggtccggcctgccccgcagagtttgacgcagcggagggcgattttgagggtgttgaggcagcacgggaggatagaggtttttaagagcttgggtgtaagatcccctttgtcctccactcttttcacgaaccatctgtttttatatttcatgcctcaatgactttttatgggatcagttattgtcttcttggacaaccctttttttttaatggattaatcttttgcatgaattagttattgtttatgcatcagtccttttcctttttttttttttttttgggggggnnnnnnnnnnnnnnnnnnnnnnnngagggagaggagggggggaggaaagaggagggggaggggaaagaaaaggggaaagagatggagaaagtaaaagttaggaggattgttagtggtggtggtagtggtggagaggtgttgcctcaaaaggatgaggttgcgaggcaggagaaggtggaggaggggaggaggtggacggtgaaggagaggagtgggcttgtgggagatgtgaagcggtgggtgtgatgtttggaggttggataggggctgtgggatatgtgtaatatctgggagttgggtgtttattgtttgtggtaatgtttgtattcggaagagctgcatgtagaaagatggcattggtggtgataaatggtaatcagcagaagggtatctgatttctggacatccctcagcaactaggtatttgagcttggatgatgtggtgcgaatcttgccaaccgaaaatacttttacatctggtccaaactgtctaggtacatcacccatctaaagctttcggtatcttttgtctgaactttgagtacaagcaaacccctgagcttctgttgtctgttctctaagcatttactatcatccatcgaagctcagagatggctgtcaaaataacgcccccggtggacaaccgagttctttccttttttttttaaaaaaaaaataatttttttctttttttttttttacctgtctcttttatgatgatctctttctcttatgtatcattgatgtcccatgctcagaacctctgttgtgttgtgcacggggtggtggtcctctcttatgccccatattggcgtggtggtatcacagcacagaaaaagggccgctggtctagtggtatgattctcgcttagggttcaccctgatgtttacaaagtcaatcttcctttcagaggaaagcttgcgagaggtcccgggttcaatccccgggtggccccagtttcttttctcttttaccatttttttggtatcaatgtgactccacaggttgcagcggggccggggggttatgacggtgggaaggattgggctgcatgtcaagatgggagaaatgttgccttgttggggggcacgatgggaaggggaattggtaggtgacattggagaaatttggatagggtttccaacgggagggggacttggggtgagtcttggtgatggtgggcctcaaggattggatttcttaggcccttgactgtagatactcttctaagttggaggtgtgatcattctctttttcttcatctccaagtcctagctcaacagccgagccagttggcgctggaccttccatcaaagacaaaatccccctcgtccaatccaaaacaaaaacatgacggtacctggaaagacatgatatcccagccgtgnnnnnnnnnnnnnnnnnnnnnnnnnnnnnnnnnnnnnntccctgacctacaacaacaaaaacgagacgacaagaaaaaacacaaaggattgacaattttccaattgtagccgaagagaatggagtgtgtcgagggggggaaaagacaaagggaactataggttctttgtttgttttggagaataggtgccccatcgggcatacacccacataataatacatacgagatggcttcttgctcgggaggccggcacagaagaggggggaactttccctatggctacctatggactgcatgtgagtgggttgggcgaggagatgttgagttgaagcaaagttgcaaacttgcactgatgatcagaatgctactaaagacacaactgacgacgaccaaacgcgaggctgcatagcaactcaccgaaccaattgaacccgatggtgtggtaagtccgagtcggccgccttacgagggcggccatcactgaggcccaagaggcccaaagagcatctcatctgcagatggtgtcattaagcgcggggcctccctcttgtctcccaacgaacggcagatggacgcagatcgtcatcacgattcgcagaggcaactgctttgctttgacagctctgacaacgcagcggtgtggggttaaaacgtttggaccccaacatctggagccgagggaggtgtgctccagctctccagacggacacgatgctgcgccgcagtggtagtgtacactatatagtaggtcctgcaaaaaaaatagaaaatagattgagacatggctgggctggacgtgcagatcgttgaggagagtcagagatatccgtagggctgtgtgtggtcggcagtgtagtaggtagtggtgtattgtcatcagtcaattcccgcgtcgcggcatgcagatgggatgcatgaagaaggtgtccagagggccgcactgtgacggtacacgacaccagtgcctggcgatcggctggacaggaggagcttgactgaagcttggctgcctcgtctgacggttttgacacatgcagtctgatctggctgtcacgggcaatatcgccaaagcagtgccgaaagtgagaagagcttggaagagcttggaccggctggccaaaccgcggggatctctctcaaggtccatttcccagcgccggaaagccgcatgccgtctcagcccgccgattggtgcggtggccggacccagtgccgaaagagtcccgtgcggcccccacatcatgagatgaacctctcgcagtgtcgggtgctgaggtggcccaagggtctggttgatattaaaaaccttcaccggtgggacttgaaacaatgccgacgggggtgtcgtgcaatgggcggtcgggtgaaatgcaaacatgttgtgttgtatcttcaacaatgttgcatgaaacggagccctctgccggcgcggtttccgaagcaatttgtcgttcacagatgcaactaacaaagataaggaaacgggcgctgacacttgtcttactcatatgagcttgacccttgtgaccgcccgccccaggggcccggggcgctggaacgccacagtgcacacgcaccgtctgggccttctcgattggatgccagtgccaggatcaggagttgacctctccaacagcagtgcaacctcagcccggagcaaacccaacgggccggcatcctgcttgactgacggctgacatgctcgaaccggcagctgctccagacccggcccatggctcccaagagcccaatttcaacactacctggtctagtttcctacactagcagttcaagccgaacctgagggcattcgacggcatctcaattccttccgtcgtccggcatctcggtgaagcgtatcaagtaaagcaggaatcaatcgattgaccaagtcagtcaacagtcaacagagagaaaggatcagggtgcagcaatcatttcattcaactttgttgaactcggtgtggcgattcaaagaggttagcgtgggttttgactggtcaacgcacgccgcgcgcttcctcttcaatcacctcccagctctctccgacggcttgggtcacccgcacgtcttcagtcaggtctccagacagtgcgagcccacccagcgcaaaggtgggcctgcagcagacaactcaaccaatcaccaagcttgaggccgctagcgtaccgcgggcttgtttcctgggaaaaccgctcgccacctgacaccagcagcatcccaagccgacaccttgctcaacccggcctagggctctctttttgcgtgtttgagcagctgatgagacagctcctttttccttcctgtctttgtcttcttctcgagtccttcagccagtcagtcagtgtatagtctgcataattgatcgcagccgacatctcctccatccaccgtctgctgccaagtccccgaccacgagagccacgccggttcagcgtggccgccacggcgctcaagcccgcgcaggaatacactactcggtagcgcaggaaatagggaaaacgcccaagccctcataaaactatcgacctccccttccccttccccttacccttacccttccccttcccccccgtcaaacccgtcccgaacagcggtttcccgtatgccgtcgcccgtccagctgggtcggccaactcgaaaagcgtcaatcagccatgtacggccaatccgtacactggcgctcgacgctcaaccacgatgcagagggggacaaagacaaccgagacgaaggcagggcgccccgacaagacaatgggcaccaccaggatgaagacgagcagcaggaggaagtcgaatttgccagtcgaattgaagagtggaggaaacaacgagctcaacgccagcaccgagatcatcagcacaatggacagcgttatcggagacatagggagaaatcgcgccaagcctcatcgtcaccacagccggccgattcaccatcacccgaaccgttacctgggaacgcatcacccccaggacgatcaaccgtcgacaggttggcccgcgagctgagcaagcaaaacttgcaacacagcaaccgtgtaaatgcacagtcgtcactgccaatggccccttcgccattgcaatcgatgcctcctgtcgtgcctgagacgccatccatcgccgcagaaacgtttacaacgccttttcctgcacatgtggaggtggatcaacaatatcaacaacccacatcgtctcagccacctactattttaccagagacagctgagaagcccgaggataaacgactcgactttaaggagctccgtcgacatgccagcgcgcgtgcactgcaggctcgcctacaggccatgattgacaacgaaacgcagtgcaatgtacgcagcgagcctatgccaccaccgccgccgccgcctgcagcgaccatcccaagaccgtggttggcacctcctgtgggtgaacccgtcgttatcgaagttgacccagactgtgccatgccaaattgggacagcagcttggaggtggacgaaaacgacaccggtgatattgcgcttgacggtttggtgtcatctgcacgccacgcacatgctcccagcggtgttagaaagcaatcgattgggggtgtcgctctccggtaccggttgtccgtcgacgcggcgcttcgctgccaaaacgtggtcagaaaccgccccagaatgcgaaagagagacaagtcgcgccacggaagcaccgtctcctctgccatgacgtcggccatctcttcacctgttgttgggcccaccataccctcatcctcgtccatgccgccaccaccaccaccctacactcaaccctagaagggtccgttcttgttgtacattttggttttgatattcaacatatatggatatatgataccccagccgatcgatcccatctcaccacttacaaatcggcggccgtctgctcattacagggtttttatcttttctttactttctgggtgtttcaacaggagttcgagcgatgatccaaggcttcggcgtcaggggttctcaggagagaagcttgtgtagcttgtctttgttggttttttttgttgcatatatcgaggagtttgggcattcttttttggcttatgggggcaaaactttggggaatacccacaccaccattttacaggggcgttgcaaaacattttagacacatggacgtgccaaaagggccattgagcaccatcatcttgttcagccggcgcagtctctacacacaaaggcctttttttttcctgtgttatttttattattttattttttttagctgtgctatgggagcacattcaaggcttttttggcatagtgcgggaagaatggggagggggtcatggttgcaacaatgtacgagaaacaaactgattagagttttttttggacacacggcaatgcatcaccattcattgttgacggggagctcgctccttgtcatcttttatttcttggccacactgttttctttcacaagtggatctcgtcagtgattatgtttgccttggatgtggatgaataggtcgtggcaagggaggagtcattggtcagtgtctcctgttcactttttgacttgaacttttggttttacatacttctacaggtagagttcggagaactttccgacgagatgttcgaaaccagcgacaacagaggtgccagctgggatggtgctattgtgtcggggcttctcgtgtgaatgacaatcgcttgcacatatcacccgcgggggtatcttagcattccagtcagagccgatgcctttgttgcgtgctgagaagctaccgcacagtatgctcgctagtggtcttcaaagacaaggaattcgggagtaagcctttgttttgttggtaagcttgcccacagctctccacctcactggacgagacgccactgatgaggcgtcaaggggggtgcctcgagacggccagaacccaagcccaccacgagatccagtgggtgtgatgcgcctggaatggatcaccgtgtcgaagcaacccacccattcctcggcaggacaggggcctcttctgatgagaccctcaagtacaaatgtgttgaacacccccatcccacccctaaacgcttccataccttgtgttgccgtggcaggttggcttggtttgttgatttttctgccgctcaacccctacaccaacaccagcacacaacagacccctttttttctttctctttctttgcccccaacatggcatactggaacagtcaaatactcgttaccagaagacacacaccgcacagcaccagcaccagagctcgatagcagcaggacctacggcgccgactcgaccagactgcgattcgctaccgaccacgacaaacaatggctggcgtcgagggcgtggctttcgtgactggcggcctacccctcgcggggaacaaacaaagcggcagcttctacagccatgacatggacgaggcaggatcgaccgatttctttgaccaatttgtcatgttcgatggctccgactcggaaactaccgcggaagggggcggcggcctcggccagttttgcggcgcttctggcctgcccatgtcgccacagctctcgtccatcgaaccatcactgtcgatgcccatcgccgccgagactggcggtggtggtgcggctgggactcacgggaacttcgggccaccgggagccatccacggcaacgtcaatggccacagtttgcctgccggtggctggcagggtgccgtcaactcccctatcattgcccgtcctcgtcagtttcaccagcaacaggcacagcgacttcaacgatcgacgaccaatattggggacctcaagatcaaaccggataccgaggttgacggcctaccctataccaccagcgggtttggagaagctctcggtggaggaaccgtgtcagactcggagcttctcaagctcgaggggctgtcgatgcgcgcgacaaaagtcgaagtgcctcagccagccgcttctgttcctccctcgcccactcctctggcaagcagtcccaagaagactagtcgcctaggggctttctgttcgagattccgcagcaaagcggcttccacacttcagggcaagtcaaaacagcaacagatggagatcaagcaagaatccatttcgactcccgtcatttcttctgcccagatgggaggaggggcagcaaagcctcggccaggtcgaccaagacctgtcaatctggatctcaccaaatcacaactacccctttctccaccactgaccggtgcggtgcctacctcatcgcagccacagaccatcagtggtgatcaactgatgaatggcagcaacaacaataagaagaagaggaaggggcggcaaacccgggcatatcaccacccttggctaaccccaaaagtaagcacacacccaaaagtccccccgccattaccaatcaacaacaacaccaacaacatcccccagaccccactccaaacccccctcagccataccatcccacccgaagccaaaagaaaacgaaaatacccaggcggcgtgtttgcgcccaagggcgaaatcaacaccaacgggggggacacaaccggcatcgacgcaatggacaccgacccgataaccaaccttttccctcccaccacctcctccaccaccaccaacccccgtgacgcctccctcaacttggctatgcacttcccccccaactccttcgaataccccctcccccccggagcagaagacttttccgtctcccaaaacctaatgcttcacatgccccaaccccgcgggcccaactctgcagtcctccaccctcaataccgcgcccagatgcaacagcaacaatcatcctcctcctcctcctcccggcgtcccaaaccccgcgccccttcttcaggagcccgccaccaccactataccacctccggcccgggcatgtccccaaggaaaactcgcaccgtcgcctccggctcgtcaacaaccccctccccaacaacaacaaccaccaccacctcctccaaacctatcccccctggcggtagatcacaccggagatcaacaagcatgaccgccctcccctcaggcaccctcctcgaccccccttctacttcccaatcatcctccgccgcaataagaaaacgccgctcctggaccggccgtcgggtctcgcattcctcatcgcagattaacctccattctctcgcctctccttcccaatcgtcgcgaggtcataaatccacgcgccggacagcgtcgtgttcgtcgcttgcggcactggccggtatgggtggtgtggagcataatggtggtggagggggaggggggtcatttgtgaactacacgccgaacgacaagcagctcctcatgacgggggtcgcgccgagcgggagcagcaagacaaagttgcgcagagagaaggaggcgaaggagaaggcgagggagttcaaagagcggttggcgagggcggtggaggcggcggggggggatttgaaacggttggaggaggtggaggaggggttggctttgggggtgtaaaaccgagggggtaatcaaggctgacagccggccgagagttattttcttgaactttgatttcaaagggcgttttgaatggccgggatgttctcttggatatggggtttcttgttattcttttttgttatgggaatgtttgttcacggttaaacagtttttattgatatcaaagagccctttcgcttcattttggtggaattttgggacacacacacacacacacacacaaaacaaaacaaaacaaaacaaaacacatcaaaccacagcaatgacagactaagaaagagaagagaaactgcgagaccgaaaagacactccttgtattattttaacagttgggatagtttctttatttgagaccaaattcaacctattcaccgctaacacacctgagcttcatgagtgggatttactgcactttttacacattggttgtgtaacataacaaacacccttggacggtgcattgcattttcatgttttctagactttgagaaaaaaaagaaagaaaaactttaaagcctttggtgtttgaaacaggtttccaagaccttaacagtcagtccttcaagacgttgagttcaagcaatgaggggtccagacgttaagataaaagacaatccgtaacaccggataataaagtgcttggcctggagacagataactacatcaatgtcagtggaagcttacatgtcttcatttgcagtggtgaaacattatggcggcattattgtgtaagcaagcaatatccaagacagacgacatcacccgctaccaaactcccaaaccattcttacaaaagcaacgtagcacataaaatccaatcatcaaacccccccccccgccgcgtcactccttgacagaacacaccccctccacccatctcgcgaacctcacgaccggggcatccacccccctccagaatatatccgacacccagatcaccgccgggacaatgaccagagccgccagaccaaagcccaggtcatacctcccctccgtctctacccccgtgatcctcgtccagacaaacctctcaacagcatacccaaacgtatgcaacaccggcccgtgcatcaagtacatcgcatagctaatccgtcccagatactgcaccggtccccaggcaaaaaacccctgccaccccttacacctccccacagccatcacaaacaaccccgccccgaggctctggtagtacctatacctctcctcctcctcccaccaccccggtatcatgtccgtaagcgtcacccacccaggcgtcctctcgctccccacatcaggctggctcatgaaccacaaccccaccagactcaccaccacccacccccacccccctccttgctttctcttcctgtccttgctccacacatcccgctccgccaaccccatcccccacaagaaaagcaccacctcccacctcccgctcccaaaacaataccccaccacccctccccccaccagcccaccgcctcaccccccctcttcaccctcgccgtcccgacgagcaccaaaaacaaaatcatgctagccctaaactcgacaggtatagtccagaggtgaacatccatcctcgttcagcccgcccgccaccctcccaatcccagacatgcataaatctcccccaccccctttccccagtctcagcatctggctctggccgtcgagtttcagcgccctcatagtgcgctcttcttgaaacattccgaacagtagaccatttcatcagtgcggcaaagtcacccatggcggtgtaggcacccatccgggtgaggatgacgacgaagaaagcggagatcgccggcgggaggaacaggcggaggcagcgccggaagatgaggctcgatagggcggtggagaaggccgagcagttttgggaggcgaggagggtgaggggcttgagggatagagcgtagcccgagatgacgaaaaacacggccaccatcggggggccggagtacaaaaggcggatgaaggggagcttgaaagggtggaggtggtctggtgtgtaggggttgggggggagggaggtggtggtggtggtgctgctgtggaagggggattcgttgtaggggccggaggaggatgtattgtggaagtcaccgtcgctgtcgtcgagggagggaggtggggggacatacccgtacccggtggcgatggtgtagcaggtgtagaggtagtggcagaagaagacaaataaagcggccaggccgcggatgccgtcgaggtaggcggtgggggacttggggattggttggacgtagcctggttggaggaaggagggtagtaggaagatgagggtgcgtttcaaaagggagcgtggtgggcggtgacggggaggcaagggggatggtggcgggagggtgaaaagggggtcgtgtgtttcgaggtcggggatgaacttttctgtttcgtcaaatgatgatgatgatgatgaggaggaggaggaggaggatgaggaggatgaagaggacgaagaagaagaagggaggctgagggtttcctggtatgtgaggggggtgtatcccgccatgatttgcttgttgtttccggtcaggggaaaaacgggtacaggacccagacggcaccgagtatttgaccagccggctgaggatggtttgcgattcgaaaatgaagaagagataatcacggctctaactgacaagagaacgaaacacagaaggaaaataaatgagaggaagaacagaagacattgagatgatatgaacctacagaaataacccaacctcttgccatgccgagagaaaagggggctaaccaagacgaaacggtggctagcatctagcgtcaactctccacggtcaccaacagtcgtacccttccgccggttattttcggttcctggcgtttcatccgagatatctgcagcacaaggctagagtctctacatgaggggctatgctgactgatgttcatgatgaggtcttgattcgcccaacatcatgccagcaaaaccacacacaatggatggtccttggggaatcaaacaggtccatcatgaaaggaagcatagtgctcgcttgtggggataagaccgattgctatccaatatcagccagtcaggtcaactcaagtctcccagacaacaagagtgaggacgaaataaggtttaccaatccagggggccaggggcctgaacgttgaaccaagcattcgggtcgccccaccgttgttccccggacccccacatcccgatctccccttctcctcttgttccactgccgccgagtgccgctcgatccagagcctggagaacagagccgggcattccgaggtatgccctcaaaagtccgaactgtgtctgtgggtcccctgtatccatcagtatccatcagcaacagtcaagacgcagagaagagatatgaataacattgtcggtgcgcccgcagcaagaggcgcgtctaggatcagtcgtgctgctccaaacatagtacctacgcaactcctggagaaactactttttggtttaacgtcacagccatgaaaacccccggctctaatccatgtgctcccaaaacgcccagactccgtgcccgctcctgtgtgtatcattctgacacccgctcaattgctcagccagtccaggaattctggtgtgaagtagctgatgatgatggtcgctcccgccctgagaatgccctctgtgctctcaaacgccatggccttgaggtcaaaaacaccagccttggccgccgcgtgaatcatggcaaactcgccgctgacctggtaggccgcaatgggcaggtccttgccgagctccttagcatcgctgataacgtccaggtactgagaagccggcttgaccatgatgatatcggctccctcgctgatatcacggatgatggcccgacgagcgaggccacgacctccaggggggagctggtagcatctacggtcaccaaacgagggcgccgagccagcagcatcgcggaagggtccgtaaagacatccggaaaacttggcagcatacgacatgagcgtcacattgtgcacaataccctcctcaatcaacttgagcttgatggcccggatgcggccgtcgttcatgtctgaaggcgcaacgcagtgagcgccagcccgagcgtacgagaccgcaacgtcggagatacggtcaacagacagctggttgttcaggctgccatcgtccctcaagataccgcagtggccatgggaagtgtactcgcaaaggcagacatcggcaacgatataaagatgggggaatctttggcgcagaagctggatgctgcgaatgacgggaccttgcgggtcgtcggcggaggtgccaagggcgtccttggtccctggtctcaatggcacaccgaacaggatgacggaacggagacctttctggacgagcggctcaaggtacggaatgagcctgttgacaccgcggcggtattggcacgggagagagggaataagcacctcctcatcgtcttgatcagacacgaaaagggggtagatgagcatggactgagaaacaaaaggcgtcagctgatatttgcggggacgagcaatcccaaaaggcgcaccttggtcaattggcgctcggcctgccatgaccgcgcaagaggatggctgtaaccagcatgcagctgactcgagatatcaccagagatgctgacgctcgtggcagaagtgctggcgtacgacatggctctcgagatgtgcgatgtgcgggaagcagtgtcgttgacggtcgaaacggaggcgtcacctcgtctgcgcgctacaccgttgtcgcggagggacaagtcctgaacgaggctagagaaagacatattggacgatggcaacagcaacgtgtggcaaagttggaggagttgagaaagagtgtaagcgggcgaccgatcgaagagtgacgtgagtcaatcgagggttctcagccgtagttgaaggatttctcgaactgaaacgtattctctcaggaccaccgccgatcgagccgtcaggggccgtgccgcacgaggagagagagcgaggtccgccgccgcgatgcgacagtgattgatggctggatttttggggcgggctggaagggtccggtgtttcctgacaggctcaacagattggcagtcggtcgatcggtaggtcagggcagcattcggagtgggaggaagaaaggcacaatctgtatataaatgagaagaaaatgtcgcctccggaaatctgggcccgaggtgggatcaaggacagcgaacgccgaagaaagttgcgtctcttcacaggcaggtgacagcaaaccattaggcgtgcgatgccccaatctggtttcgtgcactctcgactctcggcctcgggaattggcggggttgctccaccccggtcttcttccgctgccattcaccaatcagcgcacaaagatttcaaacattcggctggccccactccgctgagaaaatcgccatggtctcaacgtccaacactttttttgtgttgtcggcaactccagggcctccccggcttgtgagggagatgcagtgatgctcagatcttacaccacagccgctgatcaatgattgaaaggacgaactcatgattttaaccaagtaaacttcgccgtacctgcactaccttctttgaagtctccataacacatctgacaaatgtcaacatcacagatgaaccagggccagagtgtgttcataatatcaagtatgtatcgtcgtataaaataaaaacatcgaaccccaattattacataacagacattggtatcatatagaagagtaaacaccccatccaccacttcctctcctctcgtcttccgctctcacatcatcgactcattactccttctcaccactctcccctctacaccagtgttaatcatcagggcatcctcggacccttagaaccatctccgcctcctcctgggcgcaacaggagtcccataatcagtagccggcacctcccccttcacagccctcttcctctccctcctcttatgaatcctcccactgcagcagctgaagaaaacaacaacagcaccgaccaagctcaacaccgcagccgcgagcgtcatccaggcagcattatcatagtaaaccctctccacctgcaaccccaagctatcctcatcgtcactatcccacccattgctcagattgctcctcacaatgccaaacaggacaaagtcaatgatgcaggtcacagccgtgatgataaaggccaagacagcaacaagagacgccagcagcgatccaaccatacccgcgcccaacgcaaggataaaagcgataaagttgaaggccgcggcgatggggtggaggaccatggcctttgtgagcgcgcgcgaggtgcgcaccgagttgtcagagtagaactcgccaaaggtctgctcgggggagaagttggggttgcccgactggccacggttggggccgacgaggccctggatgatgccgaggggggagtacccgaggtggcgggggcattggcctctgtttttcactcgtcatttagcatcatggggtgagcggtggagtgaagagaggaggtcaacttacccaaggacatcattcaaacaatacccaaaaacaccaaacgtaaccgagggatcgtttccgttccgtccactctccccatcagcaagatcgggcaggaagttgaacccgccattgttggtcccgccgccagggagctcgaccttgaggagagcgatagatctcactactggggccgagatgcaggtgatgatcagcaagacggtggctgaaaacagcaagaaggtgccaaagtggtggatgaagcctgtccgggccatcttgaagagcctgactgttgtgggacaaacgtataaacgtatcaaaatcaccggatgatgagaagaaagggaaattcatccaccatccagagcagctggaatgtctttcttgtatttgtcccataaggcccacaccctgaaacatggaaacccaccagcccagcaaggaacactcaaccacattcacacctaatgaaggccgacgtcatcagcctgcccagtccttctcagccatgccgcatcgcgggaaatcggcaaggggcctcacccatcggcctgaccaaccagaaaagcccagtatgttctcttctgtgtgtctgagaatctgtggaggagcgtgattggcgatcgggctgatgacgtagcaggaatccggggctgtgtacattgggcttggcaaagcacttatgaacttcttggcgggcaaggaaacgggcggccctgtttttgggcgggatgtcatctggttttttttggatttttttttggatgaggtggttggtaaaagaggtgagatcatgtttgatgaaagagttggcagtgggaggtggcatcgggaaggcgttgaagatgacaaagggactttgcatgtttggtatgcagggactacctacatacacctaagatcccatcgtcaacattgatggttgctcaaagagcgatgagatgatgggagaaccaatcagacattttggtgtacacctctgtaagagatcgctagcgtcatgtctaggtggtggtggactgctggccaccgcagtgatctgatgccacgcgtctttgtactatattctcttcagctgaagagaacagccacatttgtgggtttatatctcgtaatttcagcttttagccaattactttgaaggcctggactagctccaaaagtcatgatggtctgcatacagatgtcaaacagttctcacatacatgtctagctgcagatcccctgtaaagacagctatgttgtcgacagagggacaggcacactaacatcagcttatccgagggatccttgaaaggtgataagacatccttgagatcgtgtcattgttccagtgtgtcaaaagtgaaaaatccgttggtgaaagaaacatggtttcaacacttcctaacctttccatgccgtctatccaagcttttaaacatcctttatcccagcatttaaagtctattggaagctcgggtttgattgataacactcagttttccgagactacaagactatctatcctagctttgctgttatggcccatcccagtttcaaatgtcatctcctcgagcttgttataccacctaccccagctccatgcatcccctagaagtgtagattcacgtatatatcgaacaagtcggcaaaaaatgcaattgctcgggtacctagcctgtattttaccaagacataatcacaacgacatcaccctttccagatagcttgttcatcgcattcatcatcaaattagcattatctcaccctcaactaaactacaaactccctccccccccccaacacacacaccaagcaaaaccctacaaccaattcctcccctcctcctcccaaggcctcgtcgcccgactgtaatcatacccaaccctccactcactcaccagctcctcctcatcaaccccacaatgactctgcccatcccttcccctaaaccaccccagcccatacctcttccccactctttccagccacccctccatctccctattcccaaacttggccgtccccacaaagtcataaagcatcttgctctggtgtatgtaagccagcacactcgcaatagtattcggttgcctcggcaagaacaccctcctccttttcaaatgggtaacgacgctcaacacccccatatacagcagaatcaacagagcaagcgtgaagcttatccagaaagatggaattgtctcctgtccggcgttgagatccaacgaggtggcggtggctgtgggggcggaggagatgaaaacacggccttcgactgttgctagggaggttaccagcacggtgaggatctctgtgaggattgtgccgaagccgacgaagaagactagccagtgtttgttgattaggcctctgatggctacccagccaaagggcatggcggtgtaatcgagcgttagcgtctttgggggtgcgtgtcgttgggagaggaggtagtatggttgcatgaggcggacgtctgtctctagtgctccccaggagagcttgatgcacacggccaagacggttattaaccagggggcgcggtcggtcaagactgtggcgggggtgaagaggaatatgggaatgagggcgatgaaggcgaagatgccggatatcaaggggtatgccccggctgggcggagcatcatgggatgagggttagcagagaggtggtttttggtgtatttttcccgttcttggatggaaggggggttggtgtcgtctggggcgagggatgagttgcggaggacgtagcgatgatcttttagtttgctgtgaatgtcttggtgggtggctacgtccatgtctttgaagtccatgaggatgtggctgactgttgccatggcggcgaggccagcgatgcctttgacgtcggctaataggccagaccggcgggtttggagctgatagaataggacgcacccaaaggcggcgatgatgacgagcaaggttgtcaaaagacgggaccagacgtggtgtatgaggatgctcttttctatgtgagggcggtccagacgagtgttgcggtcaggggttatgatcaaagaggcggctccaagggcaggaaccaatgtgttggcgagcaagctggctgttgacgacacagctacagcatagtgtttgcagtggatggcccgaaatggacgcagccagacgaattgtgtcagatactcgacgttgatggactcgtccgccagtgctcctccttccttggatagctgatagaacggctcaagacgcatgacatcaaagttggtaacctgccacatgacaccatatgtggccgcaatggccatcggtagaaacttgacagcaaagtactgggcggtcgagatatcgttgggtgattgaaatttgaccagggcgtcctgggcagagcttcggtagaggatttccacggatacggccataacaatggataccacaatcaaccatatcaagtacggccatctcatggaaaatggcttccagttgggctgtggaaaaaagacctctgttttgctggcgtttgttggaaaggtcgtctgcctcatggcaaactgtcctggctcgtcctccacgttcggatcatggccaccaaccaggctgagatcaaatttggactgagtgccggtgtcctctgtcatgaccacctcgattacttctccgcgtttgttggcctcattctgtgccattttcttcactgtgtcagtgtgagatagccgcctgctgcgtctcgagacggagaatgtgcggctcgggggtcgttccgtcacgggagttattgccagcaaataatcttccgtgattgtcgcttccgctttgatgcccttccccaagccccccgtcaacttcccctgtgcctcttgctcctgtattgccttccagaactcttcatcggcttttgtcgcagggcccagcgcgctgctaacatcgaacgttggtgctctagagactcgcgggccgggtgctggtggttcctcgcctcccaacggggcagcggacttcattaacccaaggtcaataccgtcttcctcttccggaatcgcatcgtggcgtcgttgttgctgtctctgggcaaaactggggccggcattctgaggtggtgctatgagggtgggcgatgatattggctcatatgcgccgcctccattgcccatgaacgacgtccatccggttgaggctcccccataagtgtggccaacatcatcggcagaaccatagggtcgtttcccaaactgttgtcgtaggctgtcgtctgactggagtgacaccaaagaaggccgtggggggattacggcccctgtctcgtcgcggaagttgtcaaagtcggtaatgtcagacacggtagatatcctgctgacagagcctgaagtggcagaacggagtggaggtcttggtctcggtgggtaggaaggatccattgccaggtatcatgacatggtagtcaacccagatccggagagaaaaggaacaagtaacgaaacaaagacgacaagacacaggcaacctgtcgggatttggcagttaggtgacgacaacaaggctccagtgacgaggggaaagccaatatgcaggcctgggcgcctgtaagtccaggtaccagtgcggctgaggtcaagatggtgtttgagtggtccaagtggtgcctgggaccctcagtctcggggacgaaaagagccacaagagaacggcaagccaaagggggtctcggtcgggaggccgatagggctgaaggttgatgggctatgggaattgagggacgggtgatctcttggccgagcggttgtccttgataactctcctggagcctcatctcacgtcgacaccaggtcttttgtcggagagagaatatggagagggcgcatggcttccagaaagggcatatgttccccatgtgaaggcccccgcacagggtgagcacgaattcttgattccagagccatggtgggggagatgttgcagattgctgaccccaagcgcgatgttctgttgcattggggtcgaagcttagcaaccctgggggccaagagatgccacagcgcccttcagcggggcctaggtgtgtcaactttccatcacgatcatcatgcccctctcctgccatccataagcaacgttcacatacaccgtttggcttagtgaacaagagttcgtctcatcaacggtctgcaacctttcaatcgttccgacgtcaccaaacttgaaaaatgttgccggcggcctattaatagccaatcaagttgaggttgcagttgaggtcaccggtcccctcccagctgctcgcaactgtcaccatcgacaatcctcgccacacaacgcaacgcgcgataaatagacggacctgcagcaacagagtcgactactgcagcccctccgctgaaccacgcaacacagcgttagccatgggatggcagcaacaagtgtatcaggtcgaagccccctttgccgctcggctggggcctcccgagcttaaatctcacgccagcatgacagagcctcgccatctcaccgtcgggatcctcccccgctgaccagggtcttgttcagacgactgaccacccaccattcgtcccgatctggatacccagatgccaattatcaccgttccacgccgcagtattgctgacggcatcacacccaaccccgttgccattttattttctttcagtgggtggtgtccacaatcactttgataaatggcacgttatacgacacttttcttgtgtttcgtgaaaagctgcctaccattaccccgctgttgctgatggtgggagcttgaacagattggcctgctcatgtcttgtgcctcacgactgatgaccagtagcaaagatccaaatatccagatatccaaatatccagctggttaaccgttcttcaagaaaacctgtaccagagtatctatggagatctctcctctgccaaattcggccgaatcctgcctctgttacaggtgacatttgccagaatgcgctcccgttcagcgatgcgttcagcccacctatggtattgcgatgggggccgcgaagtcaatgcattattcttcaaagctgggaagtggcgccggctatgtcagctccttgatgtgatgtcttgacgggcgtccttgacatcctaatagaagctcaatattccaaacatccacatctttgctgtatcgctcactgaccttacaccatcaccatctgttcaacgccgtaatctcttttgcacaccacctacctgactccatctagcaagaagacttgtctattttactaaaatggtcgcctccttcgtctggaccgcagaagaggccaaatacctcaaagccgtcctccgctggcaagacgccccctcctcagacgacgacgccaccgctaccagaccaagagaacccagaaggagaccgccccctcccccacaggcaactatccaactttcctcccaaaaccgcaggcaaccccaagaaaaagaagaccacccaccatcaggtgaactccgcgtgttggtcctcggggcgaaaggagcagggaaatcctctcttttgagcagagtacgccccctttctcacctatcccctcccatttgttcgctatcttatacagacttgaagttttcgcaaggcacattccctcccgccacccaacccacaacagcaacaacaacgtcaccatcaggggagtcccactcaggaagctgccgacatcccatctttctcctcccctccacaacaggggacagcaaaaaaaagaaatacatcatccacgcgctagaattcccttccaatcagtcatcttcgaacccattgctggagcaagcactggccatcaccgaggcggcggttgtggtttatgacacggcaagcgccgattctttcaggttggcgaaaggggtggtggaattcatcttggaacatttcaacccactcacaccatccccgaacaatagcgccaacaggagggtttatccagtggtgctggtggggaataaatttgacaatgacaaggagagagaggttagcgaggatgaggggagagaggcggccgggaagatgggggttagatgtatgatggaggttagtgccaggacgggggaaggggtacaaggggtgtttgagactatcggggcggaggttctagctgcgaagagggcgacaactacggctagggaggtggggagggaaatggttcagggtggtgggtatgagaaggcgggcaacaggccccaacttgtgaggcaaggagggagtgcaggcgggagtaacaagaaagggggtttactgagaaggatgttctgggggaggaaactccacacgcggcagggggttgcttgagttcgatgaatatctggctctaggatgccgaagaaagtgtccaagtggtgtaagtagtgcaagcgagtgccagcagcatcaagagttccaacacaagcgcaagtcttcacacaaaatgttgtcaaaaatgtattgaactaacccaaccaacccatccctagtccattccacaagaaaagaaagccacaaaccataacaagcaaaaagaaaacatcatctccctccttctcccctccccaggccagctgtatgactcagttcaccccnnnnnnnnnnnnnnnnnnnnnnnnnnnnnnnnnnnnnnnnnnnnnnnnnnnnnnnnnnnnnnnnnnnnnnnnnnnnnnnnnnnnnnnnnnnnnnnnnnnnnnnnnnnnnnnnnnnnnnnnnnnnnnnnnnnnnnnnnnnnnnnnnnnnnngataaagaaagtggtatgattcgacctcaatgcggcgacgctgtgcactaagcgttgtcttggtacctcggcgggctgcgaggtccgtcggcggggaagaatggcatcgacggattagctggagattgggggcggttgccgtagccctggttgttgtagttcgactgggcgccaaagctctggttggagtgagcgccaaagctgttgttggagtgagcaccaaagctctggttagagtgagcagaaggcacgccgagcctctcggtctggcgccggagcgagtccgatgtaatagattcggcgtcatcgtccagatccatgcccttgttgaaaccctccttgccgccacgagcggtagccgcgagcgcgtccagctcggtagtcgtcgtgaggtgcgtctgagacttcatgaacgaggttctgtcatcggccatgtaggtgtagcggccatccgggttgtcgcggaagatgacaatgacagtggtgacaatgagcatcaacagcaaaaccagcgcaaaggaagcattagcaatccacaacacgacgcccacaacgccagtgacgagtctgggctggttaaagacctcggtgaagatcatcaaaaagatcgagttgacaaagttgatggcgcagatggcaatgttgaaagagttggtgctcttgtccatccatgggcgaaggacgctggcggcaatcagggcgccggcttcaatgatgagaaaacccacggcctgaacggttcccgagtgctgcgcaaaggcgatgaacatggccttgagtcccaagtagccaaggtagggcaggatgaagtaataggcggaggctctgaactgcacgtagaggaagccccacttgttaagtgcctgggggtccgagaagaggatataggccgggttgttgtgcatgacgatggagcggcgggcaatcataatcaccttgaaggcggcccagcagagcgtggtcgtcattccgatcaggaaaaagacagccaagaccatcagggcagccgaatcgttctgggtgaactcccacaagcacatgatggccatggacgggaacccgatgagggtaagacggaacaagatgcccttgaggaccgtgagccagccgttgcggaagtcgaggaacttgtcgctgtccatcatcttgttcttgacggccatctcgcaggcacccttgaaagcggccacggccagactgacaaaaatgaccatcaagcagaagaaggccacgcaagtcatgaaaacgttggtcgactcgatgcctgcgcggaaggccacacgctggatcccgtacacgatgtaactgccggagctggtctcgatattggcgcgacgcatgaggtcccgcttcatggcttgcccgagaggctcagcgatgctcctcggcatcatggccacagagcgcttcgcgaggctcataccagcttcgataaaatccagagatcgcttctcaacttgcacggaaacggtcgtaagcgagtcgaagatggtggccggagtaccaccagtggcgcgctggtaccaggtaaagatgtcctgcatgaactcgagacgaatgattcccatgctccactggaaatcctgggtccacgacatgacaacaggcggcagaggcacaccagtgagaccaagcatggcctgggcctggaagtaaccaaagagcgagagggcgttggcagcgacgtgggaagcggcattgtagtgaccgagaccagacatgatagccgacgatgtgagagccaaaccagcgacaatggcagtagcccacttgacaccaagcaaatccaccgtctttccgttggaaatatcagcctccacgcaagcaacagcgtttccttcctcgggaccatccgtcatggtaaaaatcacctttacggtggcgtcgagatcggggaagttgtaggcgattccaggtacttgttccagggcgtcaccggtgacgggaaggttgaagttgagaggaatcttgcctgctgtcatgggacagagaccagccagacccatatcgcatgggctgactttttgcttgatgatggggaaaccataggccgagacctcgacatcgaaagtgacgttgccctggactgacgagacagctacaatgtcgacgttggctgttttgttatttggtgtgaagacgaccttgaacaagctggcgctgaacagcgagttttcctgacaagagttgagcgagttcgactggagaatcggctctgccattgctggtgcgacgagcgccgcgagcgacgcgaagggccgcaacgggccggtgttaaaggataacctccatggtgaccaaacaatcgattcgagatgacaggcggcagtcttaaacaacctgtgcttttttagagagtcgggagttggcgtgaaggtgggtgagtggtgcggcgtaattggtttgtttactcggtttgaaccagtcgcttcttttgcggtcgtcccgttgctttgtccgtcgagtttgcaaaaccgtgagccgccagcgtgcaggtgtcggtagagagagcctgtatttttggtaaagaaacagactggaagatgaagaacagctaaacgaggcgctgagagaaatttcgaagggaaaccagggaagaatgcggaatgaagacggcgtcgagtgaagaggcgcgcgcgcgctgtgagaatcgaaggtgggttgcttttggtgtcgattgttggcagggagaatagtacaaaaagcgagagtatgctgccaaacaacggcgaccagttggctagttacgccaatgctgagaattccgccaccttttctctcaaaaacgacagtgagaagaaggagattttgcaaccatcaagcggatgcaaaaatctatgtggtggtgagaggtggaaatggaagtctgagtgagagaagcggaagacgagggagcatttgggattaggggggtctgagaggaaacgggggacacagcgcttgtgtcgcggtgcagcaggtcttctgtcgtaatgagcgcacggggggggagcgggaagcgccaatgcctgccaaccgtctctgccagggtagcgcccgttaatgcacgcttggagatgagatcgccatgttagtgcatgacgatacaaatgtcatgacttgtgcccaacggcgggtcaaccgctatctcgtggccgggtgttacagactgggctctaacagttcaacctcacagcgcgtagccgagaccgtcgaaccccttattactcaatgcagtgctactgtcggagaattcgatttcttcatcgacattcatgatggatggatatttctcatgagcaaaacaacagaatgaagagacattcgtattgcattccaagagtcttgacgctttcttgggaggcgctgggcgagacttgggaggaatcgccaagcagggaatttgaacatgttgttctccgcgagttccgtcatagcattccgttccctcaacggtgagagggtgcgatcatcaacaccgcccccctcttgcgagctttccaagatcttgtctgcatcttgcacacgcaagctccatctcttttctgtcactaccagccaccgaaccgatagaaaacgttgcaaatccatcctagaaatcggatacggattgtaatgaaggggacttgcacagcccccccaccaacatcccggcaatgaaacgggagcgcccccccgcttcaaaaagctcgctccggtccacgtttctgaccagtccgttttgtccgtgttggtcgccatgatcacggctcgttttgggtgggaaatcgacaggcaagagcaagagatgtcatttgtttatttaccacttccctggttcacaagaggcagccttcatgatgtctgcagatgcggtggcggccaatcaggtcgtgacccctccctctgatgacatgcagcaggtacaaggtggtgttgggtgtgcccctccagccttcaaggtccagaccactgagggcgccaagaggtatccatgggaagacgaaatcgtcagtctcttgggtttgtgatccagagtttggacctggagaagaaaagacaaatggagttgtcagtccggtcagttgctcccgtcgaacgcacatccatggcgatctcccactctcaaacattggcgtctctcgggaactgcagcatgcgaaacgttccatctgatgtcccgccaagggtccctgtggttatcattttttttggtctggccctctctcacgagaccgcgaaaatggtgatggcagttgatgaggcggagcatgtttgctctctttttacgagcttgatttttgatgaccggacagcctctccggggggtgacgcttgagtataagtcgatacagttgaaccgagcgcagcgctacttgacacttgtggctgccgctggtcatcccatgtcgagcatgagaaacggcgacggtgacactcatccttcaaatagcttgggccttcttatatggtgtcccgtgaagccaaatgatcctctcgcaggcacaggcgcggctcccagattaaacaagatggacacaaggtccatctggctcaaggtcttgatggtcacttacacacaaacttggcaggggttagggcccagagagagaggttgtctaatctgacctctgacttccctcgctaaagggttagggtctccctgcatcagctttattagatgcacacgataagataacgtgtctcccacatgccgatgacctcatgtgaaggtagctctaagcaaccacccccaccatcatcgctagcatcaccgtatagactagacagctatcggcgactatcctcactgcatcttggaacaaccaaccgttgaaccgtctctgaacccaagaccctgtacctaaactcccacccatctgcccacccggcacctccgacaaacatgttcctcctccgccgaccacctcggttcagaccatcccgcatcttcagccatgtcccccaccaaaagccaacacccagatcaccaccaccaccaccaccatcaccacaatccctccgctcctatccccaaccaagttggcactccaccaaaccccctcccccagaagaagaggaaatccaccagcgcatcataccccacaagcgcaacccctacaacccctccaacaaccgcaacccctactcctaccgaacctacaacaacgaccactacatccgcctccaagccgccgagcccctccgcggcccatcaaagatcacaaccacagccgtaatagccatcgccacaaccgccggcctcctcttttactttgcgaacctcgaaaaggtgcccgtgtccaaccgcacccggttcaacgtctacggaccagactcctccaccctaaagtcagtagccgagatgagctacaagaggttgttgatcgaactgcaagatcaaggagcgaggatactacccgagtgggatccacggactgtgagagtgaggagggtgatgcagagactcattccctttagcggaatgggcgcgaatcaagactgggaaatcttcgtcatcgatgccccaaaccaagccaacgcttttgtcctgcccggcggaaaagtctttgtgttcagcggcatcatgaacctcgcccgaggcgacagcgccctcgccaccgttctaggccatgagatagcccacaatgtcgcagggcattttggcgagaggctgtcgcaggacattgggaagaatatccttttgttcagtctcatgctgcttgggggggtgattgggattgggccgttgattgcggggtggtttgggacgagcgtgattgatatcacttttgggaacccgatgagcagacttcaggagacggaggcggattatattgggttgatgatgatgagtgaggcgtgttttgacccgagggatgcggtggggttttgggggcggatggagatggtgggacagagggaggttgcgaggggacgggtggataatttttctgcacgaataatgtgcttaacttacacttccgattgttctttgtttgtagagagtacatggagtcgattattagcgtnnnnnnnnnnnnnnnnnnnnnnnnnnnnnnnnnnnnnnnnnnnnnnnnnnnnnnnnnnnnnnnnnnnnnnnnnnnnnnnnnnnnnnnnnnnnnnnnnnnnnnnnnnnnnnnnnnnnnnnnnnnnnnnnnnnnnnnnnnnnnnnnnnnnnngatgcgttcaggcgggcgttggagacgggggggtttattattatggggtggtgacggggagcggggtgtaggagggaaaagcgccgttccaagggacaggattgtgattttctagcgtggagttggggacattttgttttgccacccgtgagggtatgtaacatgaagggcggtgtatgagagagggatgtaaagtagttgctgggctgtctacaccacttgatcaatttacagggaataaatcatccaagggccgtcaagcatggttgccattgatccgagcccaaacaaagtcttggatactaaaatcaaatatcggatatgcgaactgtcaagctcagactatgtatcatctacaagcactgcaagcccggatagtggatagttgaagctgagatcttatattgggagtggcatcatggtgttgcttcaagatatgtgacaaatcactcttttagaaatctcttgcccctgtgactcttgtaatcatgaatctatagatatcaccggccacaccctctcttacaagcctttacccacaacaaaaccaccaaacaagatgaatccaaacatctccacttcgaaggaacaacatcgccccttttctctatcatatccatacctatacaaatactaaacacagtggtatcactccccattccactccccattccactccccttccattccctctccccttatcaacctcccctcagatcagcgccaaccccccaaaatccctctcatcaatcggcttatacctctccgccaaaacctcctccacactcctctccaaccgcctctccctcttcgcctggtcaaacctctccgccagcgccctctcaatctcactcacaccctccaacttagcctcaagcttcccctccagtttctcctccgccaagtaaacctttgcctttgcctttccataaacctccttccccttctccaccgtcctctcaacaacctccccaatctttttttctgctctaaaaagtcccttctcagccgtctgccatccttctctgcttgcgtctgctactcgctccttgatggcgggggcattatgcgccaggtcgacgacggcggaggaggcggttgattcgatagcgggggagtgggactgggcccagtttactgcggcgatgacctctgagttccagcgggactttgcttcttctaggaaggaggtggtggtggaggcgagggtttggcgggggatgtaggtgtgtgtgccgtcggtggtgatgtaggatgatttgcggggggggagggtggaagaagacagggggttgagggtgtcgagggtgtgggattgggagcggaggagggtggattggacttcgcggttgcggcggtgggtgtggagggctaggtaggttagggagagggtgagggttaggcctccggtctgtttgttgtgtgactggttagaaatgaatgggaagggtaaaaagggggaagggggaaagggggaacatgcgaagccggctatgaagcccattttggtgtctgtcggtggtggtgatgatggtatgaaccctgaaggtgcgcgattaggggaggagcgcgcaaaggcgcaacgcggtgacccggcggtcggaggttatgcgatgctcaaaggcaggaaggaatggaaaagctgcagttaattgacccttccccaactgaagcgcatgttgttcagataaccgttggaagcaacaagtccacgaagtgacgtagagagatgggcttgtgaacaacagcaacaggggacccaaggggcacccgggcttggcactcatcccgacaccgttggcccccacttgtggcttttgcgctcccggccggcaaaagagacggccggcgctgataagatcaaaaattcataggtaccgtaccggagcgcaaagagacacacaatacaccagttgcccatcccgccgaggcgcatccgaacccacccaccaccccggcgcacccattgacgacgacgacgacaactttgataccccagccttcccaacccaacctccccacctctaacctacctacccccccaaaacaaaccttcaaaatggccggcggccacgtcaaataccgccacctctcccgcacctcctcccaccgtcaagccctcctccgcaacctcgtcaccgagctcgtccgccaggagtcaatccacacaacatggcccaaagccaaagaagcccagcgcctcgccgagaggctcatcacctatgccaaaaagaacaacgaaaccagcaggagacaagcccaaggcatcctctttgtacgtcccttccccctcctacccttccccaccgccccctctaaccagcaaatatagacccccgacgaactaatgcccaaactcttcggccccatccgcgagcgctacctcaaccgccccggcggctacacccgcgtcctccgcaccatgcccaaaaacaagttcgaccagggcgactccgccatcctcgagctagtcgacgggccaaaggacatgagatttgccatcaccgccgccgctgtggcaagagacaggaaattggggacgggacacacggacatcacgattaagaatatccaaaaggtcacgcagtttaggcctgaggggagggatcagtttgaggagatggttgaaaaggttgccgggctgcagctgaacatgaatgagctcaaggacaaggcggtcaagaaggagtagatcagacaagatgggtgtattttgtataatatgggggtgggaaggtggtggtgggaaaaatgcgcgcaaacaattcttcacaagtgtaattttacaaaacagctagaacaaaaaggtatgggagggctgaaaaccaccggaaggtggggggcaaaaaacataaagaacgagcaaaaacgattaaaaacaagattgaatcttctctatacgcatccgggtgaagagactatacaaaatcaaaagtgtccccctgctccttgatcatctttcctaccctcgaagtccccacaatcctctccagcttcatcaagtcatacttactaaacatcaccctgaccactccctgtccgtgctccaccatcaagctctgctcgctcttctggaggtagccacccgcaatctctcggtagaaaagcgggttgtccggtaacgagtacataatcaccctcttgacacccttgatctgataccgtctaaagtggtgggctcgctcggtgtacagcagcaccttgtgccttcccgtcaggaaatgagacctcgccctggaagcctcgggaatgtccgcgtattcggatatggtaccaaaggtgacagcctccacgatggggttgttggcgaagaagtttctgacccggacaaagtcgagataggaagggatgaagatgagggtgctgttggcgtctttggcattgcgcttggtgagaagaggcacgatggccttggtgaagtagttgaaacgggcgtctgggtcggcggcgacggtgggggcgtcgaagcggctgaatgtttggcgagccttgacagggagatattggattgtgccggggcattcttgttggagacggactttgccggcccagttgtgacagtgggcacgcatgagctcggccagctcgggggtgttgaaggccgagaatacgacagtctggcggaagtacttggcctggtcgtcgaggtaccagctgcggacacggctaaagtcgcagccgtgggcgtccttgggttggatgttgaggtgctcgaagataaactcgacgtgctcccagttctgcatcaggagagcgtcggcttgatcgacaatgacgagctcgatcgacgagaggaagtcaaagtcgacctttctttcttcttcggaaccgatggccatacggagacccagaggactagcaaagatgatgtccgagttgtagaactgagaaaagtacttgacagacttgcgggtgaacttcatcccgaggcggaacatgtcgtcgtcgttgcctgagaagaggtcccggaaatcttctggcttgtcatcagagaacttggacagcttttcgatatatccgtcttcaaaacgcttcctgttctcctgctggtctggttggcaaacagaaagaatgctgtcgaccatcttgacgcatgactgcctagttgggagtagcatgagaactttgggacgggtgaagccctgatccctaagctcgaggtcttcgttggcatcggctttggcgagtctggcgttgttcttgatcactcggtcgcgggtcttgtaaagatgattgagagcatgcaaggccgccagattccgaagatcctgtgatgatccaactgttctgtcgcagtacagcatatcccgatagttgaaaaggaacggtgccacggtcttctcaacaacgccaaaggttgatcttttgaattccataacctccttcagccgttttttgagatgcagattcgaaacactcgttattggtgctggtaatggcaactcctgtccgtcctctgtctgtggataactccaataggccctggtggactcaaaaggctgccgttgcatcttccattttccgttttgcgcagctcgcactcttggcggtactgtgttttcgtcggggtttgagatgtgagtttcgaatgggtcggtctcgtccagatcatcgtcctcatcaaagagatcttcgggttggatatcagcggtgtcctcctcagcctcttcaacttcgtcaacatctctttgctcctcctgctcatcgtctctctcatcctcgtcgccagattctggcgctggcgctgcctctggttgattgtcctctgctggagcatggtcaagctttctcctctttgccttttgcgggttagtctcaatgagtctcttcatgagatttacatatggctgagcggacgtggcatcctcctcctcatccgaatccgaatcaacaagactcatgacatcagactgctcctcctcgtcctctggaacaccttcatcttcactttgggaatcgctgaattctgtcagtcaggacctttttgtttcaacgagttgaatgacttactcatcattcgcaagtcgtgcgctgtcgaacttggcgctgcgtggttctgtcggtgcgcgtgctcttcctcgccctctacctctcgttccacctcttcctcgggatgcaaatccttctcttgcgccgcctcttgatcctccccgtgagcctccacgcgagcctccccgaggtcctcctctaaatcctgcacctcctcttggtcccatctttgacctttgagtgaatgagtttgtgatgcaatttgactgcaacaagtcaatcgatggcagtttgccagaaaagctgtataaatttattgtattttcagccttgccgcgccggcaatccagtaagccccatgccaagagacaaaccaaccagggtcgttagaagtgccccactgaaagccgttcgcagagctcccgctgaaaaaaaaaaaaaatgatgggcagcctcgcgggtgctgcagagttgaaagaaaactgcccaaaaactgccccgccacttatcagcttatcttagcgcgcacaaccacacaggtcccgcatcggctgcaaaaccaaaaattcgaggtctgaccccagcctatcgcaggctcaggctcaggttcgtgccagttgagttgaaagaaagagaagggtccattttttgctggccagtgacgaatctcctccccgacccgctcagaggcagacttcccttgtctcctccccccataatctactccatagctggccgtcaattttccctttgccttgccccggggtccaacgtccactcattcccgataatcgtccatcaccactcccaaaccaccaccccgagaccacccgagaccactcaacatggctgtcgaccaggagaactttgtccacctcaccaggccgcttgcgcccaccctcctgggcttcggtgccggtagtgccccgcttaccgtcaacatccagccccaagtatgccagcccctcctatcctacctactactcccggaccagcactcttcccccaatggcaccttgatgtctagactgggtgtcatgctgtacgatcgcattcctggaaggctaaccgtgccatctctagtctgtcttctccatcatcgaccatgccgtccgccgcgatatcaacggctccaactcgaaccgcgtaatcggcgccctcgttggcacccgcagcgaagatggaagcgaggtcgaggtccgctctgctttcgccatcccccacgtcgagaccgacgaccaagtcgaagtcgatgtcgattaccaaaagaacatgctcgctttgaccctcaaggccgccccccgcgagcagcttctcggctggtacaccacctcccacgagctcaactccttctcggcccttatccaaaacttcttcgcctccccagagaccggcaccttcccccaccccgccgtccacctcaccatctcttccgacgccggcagcgccatctccacaaagacgtacgtctccgctccggtgacggttgtctctgagcgcgccgccgatacctgtctcttcattgaggttcctcacaagctgttgatcgccgactcggaccgctctgccctgagcaccgtctcctcggccgcccacaccgaagctcgcgccgcccctgttgtctcggatattgagaacctcgctcaatcgctcgaggttgtctctgacctgttggagcgtgtttccggattcgtcggtgaggtcctcgacgaggagcgtgacggctcccacgccctcgggcagtatcttatgaacgccttgtctcttgcgcccaaggtgtccaacctccagatcgagaacgacttcaacagccacatccaggacgtcctcatggtcagctacctggccaacacgatccgcacccagatcgacctgtcgcagcgtcttgccacagccaccattgtcggatttggcggcgaggccggtgagaagaaggagggcgaggagggcgagaagaaggagggccgtgagggcggcggcggcggtcgcggaaggggagggaagcgtggtggtcgtggcggtggtcgtggtggaaatcaacaaagggaaccgagggagccccgggagaatggcgagtagaagaagaagaagaagaagaagaatcttgaaaaatagatgatggtcttgttcggtttcttgtgcactgatatcctcctcttcttttgtctgcttttcgacggaaaagaaacgaaaatgttgtttttcttggttctctcaaaaagcagggtttttgcggcgggatattatatgggggtctgtctacatgggaaagaaagtcatggcgttcttttttataggaaaggggaaataaaaacattgtaaaaagcgtgatctggggaagtctagctgatgatgtgagtaagaagggtctaatagggggcatgatcggcaagtcatggcaaaagtgacgggtaggaaagtgacgggtaggttgttgtgtgcgggaaagttgggtaacataatgtcagacacggatttgtgttcaagagactgcgcacatccttaaccaacaacaaaccccctactaccacataaacatcaggtcgatagtatctacagttcatctttcccaagaaccacacttgacacatcacgtatgcacaactaatcagcagttaacacaccctgtattgtctatctcacatctataaaagccctcgccacgcccccaacacgaagcaaatacaacattatatcgcattaattctatgttgagagaggcctctactcctgctgtaacaattccgctcgcctcccccctcccccgattccatcttccctcctcccctctgcaaccccaacaagagaaagaaagagctagagtggggatgatgagaggaagatgcccgctaaccatttgaaaaatacacccgttcaattttttcttcattcaaggttgttaaacaccacccttgataggaaaagagaaagcacaccccctccctgtacgcctaaaacgcctcgatgcagttcacgtcccgccacccacccaagccaacaaaaacccagacttttacgccttcatgaactttacgttatccatttcgaaccctcttactcgaacgacacacactttgttgattagggattctcatcatcaagtcgagggcttctgcggcaatgtggctgggttgccgtaattcggtaggtggctatatgtctgctgtcctggcggcccgttggacttgggtgccatgtgtggtggaccgcccatatgctgcggcgcatgcgggggcatgccgtgcagaggttgatgcacattgtggtactgcgtcatggaggcgttggagctctgtctcgtcatactgtaggcaccgggcaccggcccataaccgggctgcggcattggctgcggaatcggctgctggtacccggcgtaactcaagtgaggtgagttgaactgaggatgcggactgccgtggtgagagcttgttcctccatatgatccagccggcggcggcgtagactgctgcatggggattccgccgccgggcacaaaagactgcgtctttgggttgaaggactgacggctgtagctccctggaattggatgctggctcttgggatcgttggggttgacattgacaggaagctgtccaaaggcataaggaatcccagcatggccaggaacagggctcccccgcggaggcggataaacaccctgagtgaaggctgggggctgttgaggttgaggttggggctgcgcctggggttgtggttgttgcggccatgctggctgctgaatggccgggacaggagcgttgtacatcggcccggccactgggggggcattaggggcctggtaggccggctgaggtggcagtggagctcttggttgtggtccagccggagtctgatactaggccgcagttagcaagggaggtgttggttgaagagagcatacacggaacgtacggtctgaggcacggcattgtaatgaggaggatatccattgccaggcatcatctggggaggatgcggttggccaggtccatacatgggctgcatggtagtctgatacaccggttgtggcggctgttgctgctggtattgcccgttgaactgaggtgcagcgacctgataatactgaggccctgcagccgcccaggtaggttgttggggcccgcaccaagcaacgaactgcgagcgagactcaaagccctcgttgtcatctcgtcgttgcttgttgacctttctttttccaccgttgactctatccttggcggaaacagagctggcacgagagacaccattactgtcctcgccatctgcactgttgtcagcagacggtcatacggcgcgcggcaagcaaacgcaccttggttctgattctccttattttcactacttccaaaaatgcgttgacgggctttgttgtacgcctcttctcgctcctctcgcgtcatcctgcagggctgggggtcagacaacatagctctcttcaaatcacaaacatgtacacttacttctcccgagggacagacttgtccttgccatcgctgccagcttccgaggttggcttagagggagccgcacttgcggggccaaactctccatcctcaccccgacgcatgatctttcgcggcatcacggcgggtgccggagaactgctattaggagtgtttgctgcaatactagacagagagggagggatccggcagaagggcgtcctaaagatacgcaccgccccagcttgggactcgaaggagtgtgtcatatggtagtagtctgccagtttatgcatcagcattctgcagaatgagttgcttggaggcaggtccatgaaaggctctctgtcgggtacaacgtcagcaatgtcgggaacagtcggcaagggggaaactgcgtactttgaatcctgtacgaattcgatcacctgctgttccaatcgcaaaagaaagatgcggtccttgtgggactgcatagcttccaacagcttctcgtctgggtgttggctcaggaagccgtttgccatcccatcaggcgcgactgctccgctgacaagaggcagcttcgcatctgaggtaagctgcttgtcagagacaccactttggggggtgacgattccctggtttttgttaccaaccaggccatggtgggcagtcgctgctcgtgatggcatgtcgccaatctggatgcggtgaatgcgagcggccacgtctgagcccatgcgcgagctggccatgtaggagccgcggatggaaaacgcatcgtcgtcctcggccgcagccttcacgctggcactgtcatcaggacgcagcgattccttctcgtctagagcgaatgtggtcccggacgtgatacttttgccgtcaagactgggcggcttcgttccaagctcggaattcgagtctgctcgttgcgaaacgtcgtcggctggtgtttggccgttactggctctgctcgacctttccacggcgccggacagagacccgttggccacaatgacattagacggtgacgcctcgagcttcaaatccttcaacccctcaacaaccttggcatccatggactgagccgtgctggccatcttctgcgcagctggtgaaatgttcgattccggggtcgacatttcgagcgcggggttggccgtgactactggcggaaccggaacatcgacgctcttggtggtctcccttttctccttgggcggcgatggacctggagatttcacaatggtagtagtggtggaaatgtccttggacgctgatgcagcggcaacctgaaagcaatcacttatcagcaagcatgttctgcggcttcaacaagaggcggacaaaggttcagggcatactcttgcaaacgacagtcgctggttatcggtcaccacagcagagggaatggccgtcatcgtgcgacctttgttctaacgagcgcaaatagaaaattcgtgtctgcctatgtatcgaagttttcgaagacaaacgaaaatgcaggtggtttcggtccaagaagtgtcaggcgggggaggccggttgacttcgtaatagggcagaaagcagaagagtggcggtccggcagaaagacgaaatcaagaaatgaaacggagcagagctgtcaagagcgaaggaagtgcgtcggtattaatcatcgttggtctttgtggccgtgatcgcaggaaggggtctgtctgtctgctggatgagggcgacgacgattcgatcgatccaggggcgggatgtgatggttgagcttttgtgcactccaggtggctaccttatcgcaggactgcacaggtgcccgtcgttgtccgaccgtcggcgctccagacgtctgtactgtgtgtctggggttctcgacacagggaagccacaattgggcagtttgaagaagggcagatggctcggccgggtgaggggcggtggtgggaggatttccagcgtccgacaagtcgttgtggttgcacgaggaaatccggtgaggaggcttccagggttgcaggtaggcaccttctctctctttgcccgctggagccagtggcagcggtttgtcaggcaagcgggccggccccggttttattttataggcggagctaccaaacaaacaaacccggacttctcaacgacccagggttatgcagctgactttcctttgcgcagctgcgctggccatgctgaattatcagcaatgcaagtgcccgagcacaaaccggatccaaagcaggcgttgatgacattgggtcggaggggaggcatcatttgggggactttttgctgtcagcgctcaggccgccagaccccatctaagttgaccaatcatccacacatcctcattcccgtcaaccttgagcctcgattccagcaccacggcccccatgtgtgcagtttgcagatgcccacgtcacgatgtttatgagcagtggtatcggcagctggaatagtagtgctgttgttctcacgatgttgctgctttaaacattccttgtgacatgctttagctccctgatagttcccctgatatgtgtatctaaccctaaccccaacccgagcaacacccgcaagcatgttgcactggcttcacagtgcttggcaaccaactcaacttcaacttcgcgacagcgcgtttctacaccatcgcagccacaagcaggaaaagaattcaaaggcataaccgtctcacagattctactggcaaccgacttctcgaatttgatcatcacaaagagcggcttgacattcaggtgcagccttcatacctatcaaccgccgcatcatcgccaaattttcacttcatcttaacaattcggccgctcagcttgcaactcaatcatccactgatatcccaaacttggcatcaaccgtttcatcgaccacaacaccagaccgcatctttctcacgattcaagagcaccatgtggcgcagaagcggtccttccaaagcgacatcgacaaacgtccagtgccaaaaatgtcttaaacgagatacgtacttttcatttcaccgaaactatttccatttcccccatctaacactcacagcacggcactattcctacgaatgcaaagcttcagcccaggagcggccgtatattccccgaccctcacgaactcagcagctgttcaaccccaagctccaacccaagcttaccaatgctgtcccggatgacattgagaagaagtaagctcccactacctgagtccactgacctcaaatgcctaactgtcccacaggaagggcgtagccgataagatcctcgctgaaaaggaggccgagcgtgccaggaagcgagagctggaaagggacgaggaagaagaactgtccgtaaagggttcaccgcccccacggcggcacaggtcgccatcttacgactccgtatccagcatctcgaccaggtccccttctccagcctcaaggcgcagtcccagtcccccaagaagagaacggatcagccgcgatatggagttgtctccccgtggacatccggttcgtccacgatctctaagcccggaggagcgctattctagggaaccgtcagccattccggagagagattacccgcctcggcgacgttccccttcgccgagccaggcccgttcacccaggcgccatcgcgactttgacgatgagcctgagcctgagcgtgcccctcggcatgcgccgcccggcagagacgccgaacatgactcgcacagacgtcggggctactcgagatccaggtcgagatctcctgcgcgttctccaccaaggcgcgatgggagaggccgcggtgatggtcctcggaaccggttcagggacagggacgatgaccaccccagagaaagaaatgcgccgccagcccagcagcgggcacctccgccgccgcgcgaaaggagtctgagtcccttcagcaagaggttggcgctgacacagtcgatgaatatgggtagatagattgcaataattagagcgaatcaaatctgggtatcatatgcctactttttttctctgcaaaaccatcaagcaacaatttcgtcttgctcatcaagccttcgggccaaccccaactcctcatcctcggcctccttttctctcctggcctcttcctcttcctcccgttcacgtagtttaatcccctccacaattgccgccccgtccagcatcccatccgcctccttatcctcactttccttgcttcccctgtgactctgctcggcaaccttcttcttctcggctaatcgttctctgaccatccccgcaatggcattatccgtcctcacattcagcacctccatcttggcgttcaactctctcttcagatcccagtttggttttttgggttggagcttgaagaggtcgatgcccttttctgccgcctgggctgcgtcgatggcggcttggcggttgacttcgtcttggaggtctgctgcttgttcttcgagggtgggtgcctcgagggagagagtggggggggcttcgaagccgagtttggggcctttggtttcggggtcgtagttgcggccggagaggtggaggtgggaaacttgttttgttgggggggattgggagcgggaaggggaaggggcttcgtctgatggggagggtgagggttgtttgcgttttagggatttgagttttgcgaggcgggctttgcggtcgtcggttgctgctgcgagggtggtgtgggaggacatttttgttgtggtgtggtggtggtttttcggagggaattgatgttcctgatgttgtttgaccgcgaattggttcgaggtacacagtcgcgccgcctgtgaacaatttccagtggaggatgatgttggatgtgggtccctgacagcggacagggaagctttcgacagggttggggggtttgcgtgccgagaggtgggctgccgctcgttgccggccggaagctctgcagcccctcgcaatgccgattttttttttgggagctggatgactttctcatcgtgataagagagacatttcggagacggcaccggcgaccagcgaccggcgaacccccctgaacaaatcgctcgggattgccagtccaaccacaacatgcccaacttcgacgacgaattcgacgcatgacgacctcaccccacgtcctcccgcccgattctcatggcgcgcgactgcatcccgcgccgtcgcagaggcaccacaatcgtctagtcgcatccggggatgatactgcgggccggcttggtcggccgatcatgtctggctcgagcctgtcaacgtcggtcccaaataccccttatacaccccttactgccgccaccaccaatatcccaaacatcgagagtgcagaggtcagagcaactgctggcccagctcgcccgagatgcgcccttcaccactaccaccagattgtccttccagagcgacgactcagatatcattccgccatgggagaagtctttgggaaaggtcgacagtcatatgagccccgatgacatggaggaaacagccaaggcgaatccagatcctgcgaacaatgtcagcgagacatcgccagaaacaacaccagttccctcttcactggggccggaggaaatagaaaggaactatgcgagcacagctgagcctggggtggctagccacacgttcaatgctgcggatcgggacaatcaagtaccccaacttgaaccctaccgtttcgccgagaggggaggaaagctcgcttggggtccaggtcacagaggcaactggttggactcatgggaggccaggttccggccgctgtacagagccctgaagtcagggcgcgcctattcacgcatgttggccgatgtggaggatttccctgactggggaaaaacagagatgcttttcgaggcagccgaaatcgagcagggggagtttaaggagcgccactgcggatttggcaacgtagatgagtacatggcgaaatggatggactcgatgctctacctgctccgctacgacccagagctagctcccaaatttctccgggcgacttttgaggggtttctgacgccgaggtgggcggtgaatgatacggttgagttccttgccaaatggtgctcgttgtctcgctcaagcaaaaagactacgcatgagctcgccgaaacgatccgtcatattctgcggactcgcactctatacatgctcgagttcacccaacaaacgctgtttcttctgacgagagatatggaggccgaagctctgtggaatctgtatcgggacctgctgcagtacgctcacccgcttcacccctacacttggtacactatagcccgtcgtctttctcgggatccgaggtacaagtccagggcgttggatctgctggaggaagccatcaccagcggcgagctccacggcgacgcgcccctgaccatgatgctcagcacatgcatcctagactttcaaggtgtggaagacggccatttagagcagttggggcggctgcgccgggagctgaccacacggttgctcaacctgatcacgcctaacaagtatacatacagtgtcatggtccgaggcatgcgagccaccggtgactaccagggagcgtggaccatctaccagatcatgattgatcagggcatcgagcctgagcagttcatcttctccaacctgctaaacgtggcaaagcgcaccaacaccatcgagcctgtgctccagaccctggaagagcttgttcccgaggcgctgaagagcaggcacatctggaacgacatcatcgactctgtcttggtgatatctcggcagcacgacctccagctgaaggaggaaggccaacggaatgcgcatgctgcgttgacgttccgggccctgctgctggtctatgcaaggttctatcggtacaaggaactccagtctcttatccctgtcaggctggggccgccgtatgagacaaaagagcaggtttttgcaactgcgacctcagatatggatgttgtctttttgcgaaagattgatctcatcctcgagcgccttcctgagcgggttgagaaaccggcggttccggggtcggatgtcattagcattatgctcagggggtacacacgagcggtttggaaggcgggagaggttatcagcttttacaagcggctcagggcgaagcttatgcagggacaatacaccgtgtgtcagatttgtcgggagcaggacagccgagtgcatgatgctattttgggctcgttgctcaagattccaaagtggaacaatgtcgcgtgggctcctgcggagaactccaagagagcggcggagagccgtgatgcgttgcaggcgggttttggtattttggaggatatgattgagggtgccatgtgtgcggagagggtgttgaaggaggaagaggaggaagagctgttggcgaagaggatggcggatgatgactcgcctgctgatgaggaggcggtgcggactatcgagagtgtcctgccaagtcaggaggatgctgtcttgtcggaacaagagcctttgctgatcgaggggggcgatggtctaccaactgaagattcagcagctcaagatataatgaccgaagaacatattttagtcgaagaacatccaccaccagaagaagagcaccggccagctgaagaagattacctagcgccctcagaagaaaacctgccaacgaaagattacctttcgccctcagaagaaaacctgtcgacggaagtaaacctgccaacggaagaaaacctgccagcccaagatggcttgcctgtcaaagatgacctacctgtcgaagagcagtacttacctgccgaggaagacctatcggtcgaagaaagccttcgagggtacaaagaataccttcaggctgaggaagacctcccagccggagaagactacctaccacctccagaagccgaacgtcctgcaactcaggaagagctacagccaactgaggacgaagcccaagaagaaccgcttctcaccaccgaccagcctcaagaacccaccgaaccaccacccttatccgaaccctcgaaaccatcacccccagaacaaccccgacaatcagccccctcaccccagcaactcctccctctcctcgacccagacctcgtcacccccctccacccggccccccgcccaggcgcaggctggccctctttcaaagcccagcaggcccaatgggcggccttccacaaagaggaaacgtacctctactccatgtcgcccgccccgacaatctacacctttaatattctcttgtcgggcgtcatccgcgcctcccgctccatcaccaacgtcaaagactgcatcaagcaggcagaagactggataaagtaccttgccgatcacaacctccagcccaattatcacacctgggctattttggtcaggaactggtcgcggcagcagcggcccggggcggtggcgtgggcgatgaagaagatggaggaggcggggtttagggctaataacaagatgatggaggagttgcagttgttgagggataaggagagggcgtggagggagctggagaggttgatggaggaggatctggggagggagaaggagaggggaagaccaatttctttcattcccgtgctggcttcaagcgctatgccgggcnnnnnnnnnnnnnnnnnnnnnnnnnnnnnnnnnnnnnnnnnnnnnnnnnnnnnnnnnnnnnnnnnnnnnnnnnnnnnnnnnnnnnnnnnnnnnnnnnnnnnnnnnnnnnnnnnnnnnnnnnnnnnnnnnnnnnnnnnnnnnnnnnnnnnnaggtaataagattttaagattataagtatatttttgatatgatgttggagttgtttgagaattgtgttgagttattgaggtttttgaatgatagaaatagaggaatggttgggggtgaatagggaagagatagttggttagtaaagaatgagtttgtgtttatggagatgttagatgtgaatattatgagggggaagatgaggttggtggagggcattgtgggggaggcgacgttttaaaaaaaaaaaaagaaaaaaaaaagaaaagggggtgggagtgtatatgtacttgtatgagagagtacaaagatgttggggggtgtatattatttcagatgtatatatgatgattagagccttgtttatacttgactttcaagatatattggggctttttagtaaagttgattgcgaaaaattttgaatcacaaagagatggaaatcccagctttgaattacctcatcgctagcttttgattctttccatcccagcttgaaatggacacaacaagctcgaaacaataacaccgaatgcttggatggctggtcacaagtgcttggatagatattaatgaaagacatgttcacagcatttctcacgcagtccaaggggtcagatgttgacagcaacagaaacaaacaagctcttgatatttgagcgttggggtatcattacaagcaaaaatacgccccccccccccttttccacacatctatcccgacaaacgcctccaaccaatgcaaatatgcctgtccctccggtatcaacgcctaaaacgaatgcaactaggcctcccagacatcctttgacgcctccattaaccccggatatgcgtagaacagatgaaaattaggccttcaaaaatgtcgaataggcctccccccccaaacataaaacgacgcctcaaacaagtgtaaacagaggcctatcaggcatgatttgatgcctcccaaccaatcttttgatgcctcaaacgaaagaaaacaggcctctcaaacataaaagaacgcgtcccggcttatcttttgacgcctatccgaacatgtcggaggccttcccattgccctcatcgagcttcttttccttcttctcctccttcttctcctcctccttctcctcattctcgggacccataaccctccgcacctccggccccgtataattccccgactcaggattgtaccgactattcatatactctgtatacttcttcataaactcctccctctttcgttcatgatgccgggttgctgctcctggagggggccagcgctcctgttgcgggggagcgggagggggagcgggaaaagaggagagaaaaacgggaggggtgatggaagggataggaggaggggggtaactcggtggtagtggcggaggagtgcgagtcggcatcgggggaggacgatggggtgaaggagggggggttgcaggagagtccgccagggacagcagggctagcttaccgatgagggaggggggagaggcgttttggtggggctgctctggctggtgccgctcgtttggctggtacttttgctgctctttggccggctggtacttttcgtactggtgctgctgctcctcagcttgatggtaccgctcttttggctggtactctcgagaccgccgttgctggtcttgctcgtcctgttggtacgagttatgagactcattggactcgtcttcttgctcttcagcgaccggctgaagaagcggcgacgacggggagaaagccgggcggggagaaggcggcggcggcaggagaacaaaactggggggacggaaaatatcatcctcttcgatttcgtcccagtcgatgctcggcactcgtctggtggcatcccgataggctttcgcccgttcttgggtgcgctcaggctcaggagcaagctccaggccggcggcggacgacggctcggggtcgcttgctgggaccggcgagtcgccgaggggggggagaggcgggaagagtctgtccagggttgccaaaacgtttttggcctcttgggcgtgctgggaattgggggcctcggggtggagttggcagctgctgcttgccgccgccctggtgggcgactccaggtcgtcgaggcaacgacccagcggaaggttcgccatgaactgcttgtaatcaagcagggtgaggtcgttgtcgtcgggctcgtgggggtcccggagcagctttggtttggaggagggggagggagcgaagacggacgagctggtggcgacggggaggttggaggggttggaggaggaggaggagggaacggtggtggcagcaggagcagcaccctcctcgaaaaaggtcgccaggctcttgacggatttgtggcctttggccaccgcctggggggtcgcagagggcgacaccttgcgcccgaggttcgaagcaaaggtatctatcgacatttgttgttagaaaactccagtcaagttgatttcttcgacctttttttgctctcaagtaagcaaacaagtgaataaagtcgagcacaaaggtgaatttcgagtagtcagtcgcaaaacggccgagttgctcgacagtcttgacttaccgtggctccggcgtgggatcttcctctccaagatgaggccggcgagcgccccatcttctttcttctccttcttctccatcgtctgtgagcggtaactgcgatgccgtgcgagcgcctggttagcggttgaggttggtttgctcgagcaacatcaagacttacagaagcagctgtgaacgccaatgaacagttcagaagcgtttttcgagaagtcccaagatctcaaaacaaataagtgtgtgtgaaccgcttagtcgccatgcttagtcgtcctgcggtgcctccatcatcagctgcggacccgcctgccagccgcagtcaagccgtagaaggcccggagggttcccaaggtatctgtcgagacattgcggctctgaaagagtgttcacaagaaacagtggctcttggagtccagctctccgtggaggtggcagagtacattgtgactgacgaaaggttcgtcaacgcagtccatatatttgactcgttactatcaacctgttgatcagagttgcggactgtagagtggcgctgggagcggctgcacaagacttgttcgctacctacctcacatacaaactaccttatggagccaacagaaggaccaacaaggacccgctgctccatcttctagaagagttcactttctgctcttttgggtgtttggccttcagctgaggacacagtcttctccgtgaacctgagcacggtggagagcaggagagacatgttgcccaccgcagacagcaattcagggaactggggctgttctgtacattggaagagaaaatatcacgaggattagagtgtttctatcatgtatatgagtagagtcttctgttgctatccaatatcaacagttgaggtggctcgtgcgttcaggggctgctttgcccctgaactgtttgccaccgcccggaccatcaccatgtaaacaaacgtcaatcttcacatttgcctccgaaatatagacaaactggcatatttgactcttcaaagtgtagtttaggttcattaatgccacgagcgtaccctcctttatcttcatgttcagtccggaaaacactctccaagcacacaaagtgctgacatgcacaacaagtgacacccgtcattgaagatgacaaatgtccgagtgtgatgttgttcagatctgtctttaagccgcaagccatgtaagaacctaaccataacggtggtgacgtgttctcgtagccgctggcacaaggtccagacatagccgttttcgggggtaaagcggtgtctccaccatgaagaggcattgcaagtgtttacaacaagcggcacaggaactcgcgatacaacacttgagccattctctggagaactctggagaggtccacgttggccgggatcatgctgactgaatgcgaccttgagcccttctttggcttccaagaagcgttacacagacccagcggctacaactatatcttaccctcgccgtccctgaacatatagctcaacaaattaactccccaaagtacctttctcgtttccattcctctttgtgccagaatttacaaaggacaagtgatgaagttggcccttgattctggctctgattggcgctgacgggtattaccgtatccatcgtataagcaggcaaaatagcgcggtgaccccttttacatcaacagcgtctggtcccaaactcgcttcctctggcaatgacactcacccctgatccagtcggatttgccagaggtgatcaccaaacagaaacaccaagctgaaatggcccccatgggccatggtcagccccgaagtcttgcaatcagatgctacggtgcagatcaggaagcttgctccggagctgaaaaggcgctgtcgatcaccagaagcaccacatgtttggaaccagtctcccggggcccttttgtcagttgcactgcaccacctagcactgataagctacctaacacgggcaacgacaaaaatatcataatgtcgcggcaaacaccacaacctcacaccgaggagatactgagcacaaatgtcaggtcagtgtcttcagctgggcaagcctccaaaggtccagacctcctgtcttatactctcaccttgggtcatgatctgttcgtcatgccactccttcagtcacaggtccagacatgtcacggtagaagccgctcaatttccaatgacgacaacgacgaaaagccgtgccacggccgccgccatgatccaaagggctcttttccacaccatactgttaggtggtctccgggaaccccactgcaacgttaatcgcgcggcgttctgtcagacgctttgctccagtcttcaccactcaacggaaagacgaagatacgctgcgccgtcccgtgccatgacaaccgacaaggaaggcaccttacagctgatgcgcacaccccaccatctcacgggtagtcacctcccccctgtcggtctgaaggatcatctaaatggaattccaacccaccaccaaacacaagtaagttcccgtcacctcatcaaaaaagtcttgaaattccaaaactcgagaaatacaattgactagcatcattttttccaaaatagcaaagcgaggaaaaaaaaaaaaagaaaaaaaaaagaggcgtgacctgactttctccttggctgggcataatccatcgctaactaaccccaactttctcgccgattttcctgtttgggaatgtagacccttgtacgccttctctctcgcctttttcttcttttcttcttgtttgtcttttttcccacgagcggcttgtcacggccacccccgcaattgccttcccgcccaactgccagaaataatcacagcaaacatttttcttttctggcattgcttcttttccatctcgaaccggccggcgtagagaaacattgtgagtggtcaaatctcgaccggcgaagcgggcatgtgtgccgagctgaaggatacccataagctgaaccgacacgagaggaactgacatggtcaggcacacacagacacacacacacacacacatatatgcaggagacagatcgacggacgggcaggttccttcagctgcgagcacgtcggtcggtaaggtaggcagggcttgtgttgcacctcgacgagggagaaaggcccttaaacactgcgtctgtatgtaatgtacaggtaggtagatggctgctttcgctaggcagccgttcaaatgtctgacgatgacaccagtcgccattaagcaaagggtgacttatcttgcatccatcgtggacttttgtttttctagatacctagtctgcagattccaaatcatgtcatctttaccacctgagccaccagagtagaatttccaaaagccaaagagggtaactggaaaagaatgccttggctaagcgccactacactactccccacaaccgatcatcatcaaagatgttttggatctagaaaaaacaaccggttgatcgatagcttcgaacactgcaaggaggcgcagtgactgtgtggcatggacatactgtgtaggtagatagatggatacaacctacgtgtagctcaagtccactttcttccaccactacctccatctccatcatcaatcaacatcaccacgcaccaaaatgtaacccattctccctcgttcccaattccacttaaccctttcggtaactacttcgtccttttccctccagatctccctccagatcttccccactcccgggcgctcgctcaccagccggcccccggcccccactgtcaccggtaactcaaacctgacaccgagaagaccgactgacaacacacacaaaagacaccactttttgcacaacgttcatataatttttattacagatctgatgggtgcaaaatacacgacaggaaaataaggcaatgcccgagacatacaccaccttggttgtaacaaaagtttctaggcaggcaagatgcacccgtccatctctgcgtgggatttttaccattttgtgtgtgtgtgtgtgtgtaaggaggcaaccatttgcataaggggatggatggacgtcttgggcatttttccattctggaaaatcacctgatttgacaatcccattctctgcaataaaatcaactacagtatgatgatgcctggagaggatatgttaaatgttgacaagaaactgcattaaaactaaacaactaatcaactaaaaaggaaactatcggccgttacagagtgaaaatcatgaaaaaaaaagatgaaaaaaagatgaaaaaaagagaaagaaaaagaaaataaatgaaaaaagaagggggtattccttattcctttgcccacgctgtcaaatgttccaaatcaatccatctatcccatcccataccattccataccaacccatcatgtcgtgaatcgcaggagatatatcaaagaaaaacaaaaaaaaaaaggtatccaaatagtcataaatcatacccaactctcatttactcctcctccccctcagcatcaacatccccctccgcatcctcctcctcccccctcccactaaccacaatctcctccctcacccccctccctttttgtccctgttgaacctccccccaaaaaaggggtcttctttaaaaagcgatagtccaatgcagggcctgatnnnnnnnnnnnnnnnnnnnnnnnnnnnnnnnnnnnnnnnnnnnnnnnnnnnnnnnnnnnnnnnnnnnnnnnnnnnnnnnnnnnnnnnnnnnnnnnnnnnnnnnnnnnnnnnnnnnnnnnnnnnnnnnnnnnnnnnnnnnnnnnnnnnnnnaagctcccatcctcctcccccccaaacctgacctgcccctccctccccaacgccgccccctctagatgcttagccacatgctccatcctctgatccccacgctccgggcccctaaactcccccaccttacaccccttgacaggacacctcataacctcaggaagcttacacctctccctctttcccctctcctgcagctccctcaacctcccctcccacccggccatctcctccttctcccccggcgtcaacaccccccctttattcgccctcccggcacaaagtttcttcgccccagcaggcatgtgcatcctcttcaggtgctgggtgtacaaatccttgcgattgaaaatcgccccattcggcagacgacaaccgccattgttcgtcttggcgcacacaccctctgtgcagagccagtagtccagcagcaggtgctgcgtgatgacgtgacgcttccattcgttcttggccgcaaaggtcgcttcgcagccggcaaagtggaacacgcaagtgaaggggcgggtgtgctgcttcttgacgtgggcgtcaaagtcggtgcggtcgggaaagtcggttcggttgcagtcggggcatttgaaggataccgaggagggagccaaggggttgatccggcgtggggagggtttggggagccgctgctgcttgggcggttgttgttgttgttgttgttgaggctgggggggccagacttgggttgggatgcgttgttgttggatgatgggagcgggatggttgttgttgttgagtttggttttcttggcagggcggtgctcgtcttcagagccagagtcggaatggcgtttgggggttggggggagggaagactcctcggaagaggagtcgctgtcgtggtcgagttcccgcttaaggggagaagagtaagaagtagaagcctggatctcctccttgatcatgggcatgtcctcggccggactggcaagacgagtaaagtcggagccgacggtgttttggttggtgctcatgtcgcactgggtggatgtgtagctcggctcaaagaacatgccctggctgtagtccatgtcgttgtcgttgtagagcgagttcatgccgccgtcagtccaagccccgtagctcggcatcatgcccgagcccgtgaacctgatgatggcgtcgtgagtgctcgagaagtcgtcaaactgccctggcatgggtgagaagacagatgggacctcagggggcgtcgtgggatactcgtagaaagattcagtctcagcaccggggctcggggcgctgcccgaggcggaggacagctcgtgggaagacatgggactggcaaatcgttgttgcgtcggtggtggaacagcggaaacgcccatgctcgtaaagtatgtcttggagtgggtgtcgttcaggaaccgctgagtggtggcggagaggatagggtcgatgtaaaggttatcctcagtctgtgtcgcagccaagtcttggataggaacgtcgatgttcgcatatccaaagctcgaagtgctgctgaagatggttgagaagtggccagccatcttgaatggtgatgagggaaagagaggtggtcgatgttggggcagaaagcgtcaaagacacaaacgtacggcaagccagagctgtatagcctcaagcttgaagagccaacatgggagggtgcgagtagttatgtgcggtgctgtctgaaggatccagcaaaggaaaatggaaatgaggtcgcggtgctggtcgaggtatgggtggcacgtgaagacgcagtgaacaaaagatgcaacagcggatcctggacttgagacccacgcaccgtaatataaaaaggcgagggggacttatgctgcatagctcgatgtggcgatgatcaagaacagaccacgaagagcgggagcagcttggatcaaatatgaagaagacaaaaggtacgaaccacatggagacaagggcagtgaccgcgtttccatcttggtgtgccatgttcgggagagcgcgccagagctggcggttcttctgctgctccccacttgtgcccaagcccaccactctctaagctcatcgccagaggggaaggacgctccccccttcgtggctcgctgctcggggagaatgcggctctgctgtgggcccaggatgtactcctacagcctaagcacagcatctgggtacaagagggttctgccaagtagccaaggtggtagcgaaaaggccctggctcacaggagggggggctgaggccaggttcccaggccacccctgcccgatttcgcggcaggggggcggacggggttggcaacaatctcttgagaagcgctagaagggtgttgtgagccgtcgtctttgagcgctgcgcctcaggcttgcttgctttctgaacaagaggtgagttgtatacgggacaagtctgaaatgtacagcgcacagggtacatgatacctacagaggaagcgcgcgagatgtcgaaacagacgcgggagctgtttccagtgagagttcgtttactttgcatgcccggttctcccgccgagcactctcggggcttcacagcagaggccagtcgctcgggtatctgatatgtcacaagcgggggccgagtcaatggcgcgaacatgaacagcaaggtacataccccagactgcagactgccctggagcgcggacgggttgtgggcgagagcgatggttcgcggacagctcttgatgatatcgacaccctcccacagacacctcccctggtcgagcaaaatcccccccccccccccctaattcccaacccgacaagaggagacggcagatgacgggatgaccaaatttgaggctcttttgtgcttctacttgcttgtattcgtcgtcctgcttccccggacggcggcgtgattcgtggctcccgatgaaagtggcatttgcccatttccgatcagagtgggcgccacaaggtcgatttacttcctgcatgagcatatgtcagtcacgtcagtcaggaaagaagaaaaagctgaaaaaatcaattcatcatgatgtttggtttgctgtgcttgttggtgatttgggaggtggtcggtgcacttaggattaccgctaaaacagacgctaagaagctgtccgtttctccccagactgaggtgccccactggatccagtgagtggcccagggacccaaacgctcaaatccttattaacccttggccttggcggctgtcttcgtttccatctttcttggcggggcttccgtctcttcttgatgcttgagatgaattccatcgttgacagtcgactgtcgtgtcgtgtcgtgtcgtgtcatctcgggcacatctgacatctcgctagtttctgtcacgttcaccaaaacagcccaagcatgcagggcatccaagggcgacaacacactgcgatcgatttcctcaccaggacatgacagacagcagacgggagagaaaaagaagggttgcaaccgcggacgtggcagacgtccggaaaaggtggggttctacgcccagcttctgagcatcttcccctctggtctcaaccatggccgctctgattgggccctttgcgtcgccggtcagaatggaatctctctttcccgtcttcaaacccagcgccctgggctcgcctctgtcttgggctctgacccttcccgtccctctctgatatgccgtcgttcgtcaacaaatcacacctccaccgccatttcaacctcagagtagggtgatattgtaatttctgatgcaaaagacttcacatctggacagtcacatgtttctgcgccggccagtgattagcagaaatctctgtcgggcccagtcttcccctgcccgcccgccgtcctcccgcagctttcgcctcctcgctcttgtcttcaactcgtcccggcggcagcagcgtggctgtcagacttgtcgcgggcccgggggatcgacggccaatcagcatgacaccccagagagcaagcaagtcaagcaacaagcaaagcctattctcgtcttgggggccagaaatcttgggaaggacccagccccacggtcagagaccgccctagtcgacgtttctctttgccggcgacgggcctcaatgacgactacctatcggtctctgtaaacggcaaatggccgtcggtcgagcttttagcctcttgaccggcgatagaacacggagcggtcagagacgcatgagcttaattggcccgacacccgtcacaatgtcacgatagcaaatcgacactggtaagactgccgctgcgacactggagggggaagcctggcaaggcgacggtggtggtgacggtgcttgtggtcgccttgttctttgcatgcaccccgccgtgtaactccaactgatcagccaaacacttccgagggaacaacttcaccaactggcgacaccccgttgccaagagatcatcagcaatgacaaaaaccaaaaagacaaaacggtcaagaagctacgtctcacatgggttgttgaccttggccgccacgacgggcctcctttcacaaatgacaatcgaagctggacagacacctctaccacacacctagatccggcccattggtctcgtgatgaaaagcgcccgtctaggcgcgaccgacattcttccatctaggcaaggccctccgcgaatctgaccaacccatccgtcctgatggcgtccctttgatcggatatgggggggcctgcgtcaatgccgtatgaaacaaacaactaaaaagagcagaccaagggcgcagcaggggttggctcttgcatagacttccactttccagaacgaatggcgagtctccataacgtcatggccgcgtccatgtcgacctcgagatctcttcagatgttgagagatcagacggagcgcccttggctccagcccagtcgaaacgcatatgcaagcccgatgtaaacatgccaattacactctcatgagctacaccatcctgccatgggtcttatggctgttctacccctgagggtttacccctgcatctggagatctcagacttcaagagtctcttgggagagtggccgggccagccaccctacatcatggtgaattccaaattcatggcggttcgctcaaaataggttatctgggccggctgtgaactcactgccatctctgtttggtgtcggtatcccaactgggtgtcttcatcgggcaaagggcttccttacactcccaaccgacgaggcaaagatatcagagccctagatgatacttctaatctggtgaccgggattttgttatttgcccgtctttcggtttagatgcaagccaagtgccttgccaaatcgatggggaaagtggtgaagattccgagagcaggcacagaaagacacaatccattctgaatagcaatcacctgtcactcttctaccagctgtaaatggacacgaatgggtcaacagagcccacaacatcctacctctgtctataattcgcagccttgacgccaagtacacgatggacgaggtcatcttaggaggcccaacgtccccgtccccgtgcgtacaccatcaaccctcgtgtcaaagtggtaacgaggcctgaccaccaccattccacaaaggccatcttcgtatgctcatcttgacgcctacaagaacaaaactatctactcaatggaattggcttgcgatgttccaactttgccaccgccataggcataggctcttaagcgcgaggacgggggatgccgaattagacgcctactcaaccatccccaaggtcttttctccctgcctcttcattgatcaggtgaagtttaaacgccgtggatgacgcagtatgcagcgtccagacgatttgccaccaccagctgaggtcaagagccgcgaaaaggttgttctagtcgggggatgcatcgtgtaatgctcaaggctggtctacaccgaacaccagaaagagatgtaaacaacatcccgacctccccatcttcctactaacttcgcctcgcaaagctcttggcctgctttggcgccgacaaagacctaggatgcatgagaatcgccaccacaaagttcattgacgagaatatcctcagacaaaacacatccacaccgcatggaaagcctgagttgtgaggtgagactgaagtaaccatctacaatgagggatgtatcattctggacaccagaacgcacgtgtggatgatcaatgtgggtgggaggtggtcctaaacgagggtgcgaagggcagtaacgccatgatggatggatggatgctctggataggtaggtacgtatagacctgccatagggacgacagttctccggccgagaatctcggatcttgcctgcaatttacacacacgcacacacacacacacacacacacacacacaacctcctgggagaacatgcaggatcagacctcatctcaggaagatctgttgtcaacacagacctgtcgggaccacaggcggcgatgaggatcatcagtcgagttatggccaggtcttcaaagctggcactcattatttggattcatcttgacccatcatggctacctatccgtccgtcatcaattcaacaccatcccacatccatcccgatcccggcatcagataccactccctccaaaggcaccgaaacgaagcagcctatcacatcgtccgactatgtgcccattgactatcttccacatgcgggctgtcccttcgcgctatcaagccaccggttcacaaaaagaccctcgaaatacgaagaaaagggcactagggaacgccacaaaaacgtcgctgtccaaaagataccaatccagcacggcaagatcttgccgacctgaacaatgaccaggtttgaccgcacggtcacacccactcgaagaatcctttgctgtaatcattgaaccatgaatcaatcaaccacaccaaggccaacatggcatcgaagacgagcaaccatcagaatgagcatcaagacattatatcttgaatgggaccagaaactcatgcggctatacgccaccacattcgcaaacagaagaagatcggcaggataataccgaacgatcaagaagatccatccatctgggctatctggtgtggctgggccagctgaaaggtgcatgtcaaaagctgcaagttcaacacatgcctaggtgagtaggatcacctgctcactcacccgcgagtcatgatcgcagtctctacaatcacacagaacaaaaggaattgaattgcttggaaacaccctcgagcacccccaatcgttggtaccggaccggatctaccgagcattatcgaacacagctcaggctccgtttctctcggcgctcatcacgacatcccccagggcacgtaacatcgcctgcaatttgcccaaacctgaccctttttacactcgggggcaatagctcagggcaaagcccagttaagtctctttttcctctgggcaaagagagactatttctcccctgacactcctgccctgagccatcacgtgtggcattgccgcttcattatttactagtcccccccagctcaggcttgtttccttctcggcatccggtcaacacgcaactttgatttccgctcaaaggcttatttcgctctgggcatcttatccttcttcttgttaccaaagggatattctccccagccaacctgtacagtacactactaagcccacaccgcattccccctcccctcttactctttttgtcagccactaaagcaagccacacttcttggagaaggcttggaagtaagtatctcactcaattctgaaccgacatcagccgggtcaagacattgccgaacatgaggccaaccccacggacacatcccaaccttcaccaccaccaccaccaccaccaccatgatacccagcagggatcactccccgacctctgctttctccgcgcttaatccttctctgccactcgaaaaaggaaactcgaaaaggtcatcctaagagattttggtcaaaattcatcccggttggtcaggggagttttttttaaacgcgcgtggcttttgttgggctgagagacatacacgcatacatccttttatcacttcgcccgtctgtgtgttttggtggtacagacgcctaattaccgctgccaccctcaccctcacaaccatcattttgtcatgatgatgatgatgatgatgatcagaggttgtaggtaggtagctgagccaagctggaggtggttgcaatctcagctttcttactcatgggccgtgtagccttgagctctcaccgcttcctatgtttctcctgacaccatttccagccctgaattctgtcagtcccatctaggtgggttccggtccatcaaacttgacagataccattcagatttgccctcctcgttcaaactcctgcatttcgcctctcacacaataccaaaatcattttacacttgtcgtccccttttcatcaccatgattttaagacgtttcttcctacttattacatagatgacgacaacatgaactgcaaaagtgagatgcaatcaaattcaagtcaagagaaaatgctagtactcctgaatatccacccatccatctctataaacccatcgttaatcctcccaaaaatacccaatcccaaaaatgccagaatcccccgcttgctcaaccgaaggacaaaaacatgagatgccgtgcatgatacaaagaggtagttcacacttttgcgtagatgatgatgtcaaagtttaaaaaaaaacaacaaaaaaacaaaaaaaacaaaaaaagaaaacaaaaaaaacaaaaaaaaaaaacaaaaaaaagaaagaaactggccatccgaaaaagtgatgagatgcgtgctatccaagatgctctccccccccaaacaaaagaagagtaaaataaatctttcctcccaatcgcaatgctttcttaatcaaaactcatctcctcattagtcgcctcattctcaaacgtccggcaattcctacactgcgtatggctgcaagtgtccatacactggttcgtcgtctcaaagttccaaaatgcaccgcagttgcactatacaccaccaagtcagcaaccggttatccacatgtcgccaaggcaagacaagcacttacacaagtccacaacatctcccccctcccccgtcannnnnnnnnnnnnnnnnnnnnnnnnnnnnnnnnnnnnnnnnnnnnnnnnnnnnnnnnnnnnnnnnnnnnnnnnnnnnnnnnnnnnnnnnnnnnnnnnnnnnnnnnnnnnnnnnnnnnnnnnnnnnnnnnnnnnnnnnnnnnnnnnnnnnnagactgctggcctttaggtctcaaactcctccaattcccaatatcaaccttctcaaacccccccttccccataaaatgacgatcaatatgatcaaacctctcgctgtgcgccggccccccgaccccgcgtggctcgacagtcttgacgcaaaacccgcaccagaacctgctctcaaagttcctcccatgtcggtaatcattcagcttccgttcaatctcctccccgtcgcgaaactggtgatcccgttccagatgcccctttagactctccctgcgatgacaaaccttgccgcattcataacccccctcaccagcagcagcggcagaaaaaacctgctcggtgcaccgccaaatctccagctgaaagtgttggctgttttcgtgtcgcttccagtcattcttgctcccaaaacgcttgtcacaatttgaaaatgtgcaggcgtagggtttcgcgtggcgtttttggtgttttctttaccccgaaaagaattagtcgcttgatactgaatttggggacggggaggggacatacttaagctcgcaaggcctcgaaaaaaccttgttgcaatcatcaatctcgcacttgacctccttcgtaacctcggcaacaacagacgacggcgcagacggcgtcgtcgtcgtcgtgttgttaagaaccaccacctcctccgacttttgatacccaaactccttcacaatcctatccagcatcccccgtgacctgagcatctccaacgtcgccttgaggttctccacatcccccaaatctatcgagacaacaccccccggtgattgcccggtggcagtagtagtagtggtggtggtggtagtagtagtggtggtagtagtaggctcgggagatggcgccgcagcagcaagaagctggagccggctcgcgtcttcttcaagattggacgagtcctgttgttcagagacttcgttgtcctcctccccagcttcagattcctcatcacccaccatggcggccgactgtcttctggaataatccagagtcatctggtctggcgagatggaagttaaagtcacaggttcatttttgggctgctgctgctgctgctgctgctgctccgcaaattcatcatcatcatcttcttcttcttcctgcatgatattgtccgggctggtgtcatcgtctatctgtatcacctcggcggggtgggcgtgcatctcacccgcttcatccatcgaaggcaaaagtccgctgccggcaccggtcagaatatccggagagacatgtcctggttgctccaaggtttgctcctgaaccgggggctcaacctgctgctggaatccatgtggaatgttcagtccttggagatccatctcaatggggatacgtgggtcatccagtccggtttggctctggtggctgtggaatccagaggcgttcatgagagcagagtaatccggctggctcattgatgagcggtacatcaggtgctgtggttggatcaccgcaggttcatcaggcacatgatgggagagactcgtcatgggctggccatgtcctagtccgctccatgatgcatgttgaccagcataggtagagtgtgttcccgcttccgaaggcgcgtgctcggaggcaaccgaagcaccgccgatatccgggcggccactggcgataacaatgttagcttcccaactagaactgttgatgagtacaaggtaacgcaccgatacaaaaagttggacaagtccatgttctccttgtgatgtactcgcttcagatgctgcctgaagttgtctggcctcggccacgtcttgttcttgtccttgcacgagtcgataacacattgatagacaggtgcatcactcttgtagatcctgtggacgcccgccctgtggcgatccaggtcgttgttagtactgaatccctcggttgccttgggacaatctggcatatcgcatttgaacggcttctcgtgccgtgctttgtgcttcctggcaagcaatattgcatcagcaaagtctgatcaaccccgagtgagccaataccggcaacgtacctgagctccgagtttgtcttgaaggtgagctgtgggcaatcgagacatctgaggttgttagcagtcgaagtggtggagctcgcccgttgacttcgagcatcgcagcggcgtgtcctgtcgtcggtcgtgacttggcttagaccatagcgactaaactgctgtgtgatgttttgcgtctctgggttgtcgacgtccccattatacactgaggacgggttgcccacgctccgaatggtttggctaccgtaacccgaatcggacacaagctttcctccggttgggctcacgagcgtttctgcttcagacgggggtgcattgtttcgatactcggtataaataggtgcggtgaaatcagagtctctccatgagactggtgctgtggctagttgagagtttttgacaatacggtaattcttcaagaaatcgctggcgttcaacgtgcttgccatcatgttttgctgcgggacatgtctgttgccataggtactcaagccgcccagattgtcctgcatcatggcatatgctgtgtagttgttgataccagcccccgatggcctggtcatgcccgccatttgggacgagtcagagatgggagcatgctcggccaggtgggcgaaagagtaccgcggaagctgcgacatgatgccggccccccgtgatgactgcctggacgacttgtattattcgacgaggcaatcgtgagaacgtatgtcgtcaagttaaggtggttgtctaagaaggtgtcaacagggaggaggcctgtacagttggcttcctgatggagtccatcttggaacggacaaggagaggaacgggtaaacgtcttggcgttctagacctcgaattgagattcgaggatgctcgacaacaaggccaacaactatggatggaagatatgaaaaaggtctactaacgggcaaaagaaatacacccgattctgtcagtgtttgtcagaagaccgcagtcgtcgggcgcagttcacggtgcaagagctggagttgcccgactcagccagacattgccactagttgtgaatgggcgggcgcgggctggtgatggttggagggcgacgaacggagatcaaggttgttggagtgggatgatcaaacaatggaattccaggcaaacgtttgcgtcaatgatgtcgtctcaaaatgacttgtgcagtgaaatgggagagagggagccgatgtcgagtgaaaattgggaattgggaattgggaaaggggatggatgacaggcagcagtgccaggcttggcagagcacaggagcactgagagcacacatcggccgcctcacttttccactttccaacctggaagtttctgtttgagggaagtcggtgacttgcgactgaccggttggctgagaggccaatcaggctcggtgaagaacgcctacaagttcgcaaagctgagcacaactcatggtcgcctggtcacgtgggtcaccactgacatctcttgattggatgacacttggctgtgctacactgccaagtcacaccttgtgcttccacatctacaacagaatcagcagtgtacactctcgtggaagcaggatcggaggatcataggagcgtgaaatttctcaagcacttgccttttcctttttgttttcagtctcggaaagctacgatggctttttctagtgcagggtttgtggcactcgccatggagctcccaggtgtggtgatgaaaaccttaatcatggccgcccagtcaaaattcagaaagtcatgatcaaccttaacacgatcattttccgactcattcaactcatcaggtagtattcttttactaaacaccacagcaacctcacgagggatcacgtcgagagcctcttccttgccttggaattctggagccaggtagccgtccagcagtccactgccgatgatgagccagatggcccaacagttcagcgatggcaatcaccattctcatacacggcctctgaggccgtccgccaaatccaggaacaaagaaaagatgacagccgcttgaccttgtctgatgcagggtgaaagatgatcgccgcggagaaacatgccgaggggtacgacaaggaggcatatgagcatgctctctggttgacccaattcacacatgcaactgtcagcaccatgaactcacgccaaagcaagaagagtaacgcccgactacagacgtatttgcttaagcttgaacatccattggctactgccgggcaggtcaagacagcggctggcctggacacaaccccacccatcttcagtggcgctggcgatgacggtgattcggccaacttctgcaagatcgtaggggcagaacgtaagaaccacatcatgtcatacttgaaccagactgggcattcgactttcaagcccactttcatcacccgttccgttgccttccagcgcaggaccaatacccagtcctctactttgtctacggaacgctggcagaccccccgtgttctcaaagaaaacatgaacctcgacgacgaacttgtatacaagcctgctagagtgcgaggtggtttgctcaaggtctggggaaacaagtacaaggccctcgttgatgcgccttcaaggatggatcacaacaaggcgatcgtcgatggttacgcctttactgtcgagaatagcatgtaggaggatgctctgtgtgggtatgaaacggacaagtatgaggtggtacggtgcgccatcgaactgccagaggaatgccaggtggtgaagggcttgactttccgatttgttggggagacaaagtgacaccactccatcaactcacagcagggctgtgggctccttgacacctttgctccctcgcgtattgttacctgccaggttagcatctccggggaagagccccgaagtgcagatctgtatcggaccgtcaagcgcggcttctcttcgaccacaagttcatcggagtcctgtcgggtggctgcttctgatgggccttggcggtctgttctggattggacaaggcattcggctgtgtaacttgtataggccgcgagcctcaattttttacaccaaattctcgccggtctccttttccgcatcatggctgcctgaatcggcttagaaggcgggcgtcccaaagcacggcgaggaatgtttgcttactcggctcaagccaccatctgagaaataaaagacaggtcatatatcataccctctccaaaccccaaattctcttgttcaccattttcaagcagcgtcagatccatcttttaccccacaagcgtcagcagaccaagcaatgtttgcctgagaagcttcaacactactgtccccggcttgacttccatcgcgcctcccgaatgcgggccgatgccctatggccacgctataccgggccttcgcaggcatcagtgccagggagaccttgatatcgcctccaaccagtccgaactcgctccgcatctcctaccgtcaccctttctgtagggttatgctctcgggaggctatcaagtcaccacgtctcgatactggtcgatatcctcatacttatagatatctttgcgcacaagagaggtcggggaatctcatcaccacatcccttcttctctccgggtcggttgatgtaccaaagaccggcgaggtccgtctcagctggtctgatgtcggccaccaggcgtcagttgggtaatttgcgccgggcgacccccactcctggttgtttgcttcgttgcagatggtgtaaggtgtgcgaggaggacccagtctttgcagcagcacaactgcagagcagaggctcgactttaacaatcactcacagatggcctagatccgctcgacgcactatgtgattagatcctacccgaatgtgctgtcacttcatggcacccacacagctccttgtcgtctcacaggtggatggctggcgtcgtcatatccaacaaagatccaggctcctaggtgcagtgtgatgatgtgcaccctccgactatcgatcgagaagtctcggtttaaacgtgactggcagctatgtggtgcttggaaggggtatatagatgcctcaatcgccgtttttttatcttctcggagcaatttcagatcaccctcttccagtcattactgtgggctaaaagtctcgtctcgaggttgttgacgaatcttgtctagtcatttgaaagactgctttctagaatctcaggataccaagcaccaacacagtcaacccgcttcgcccctttttacctcgccccttgccgtcggtatgtgcgactacgaggaattcatttggtcctgtgagcactcagacttccggctcaagtcatactgccataaagcccgaaacaacccgggccacgcctgcaactttgtaaagcggctacgccattgctgggaccaaggccgtccatgtgacgcttgtcttgcaaagcaggcagctgaggcccacgcccagatgatgagcggttggtacgggtccagtcaaggtacgtcagaggtcagctgtcagatacttccatccagtgctaacaccaagaaggcggtcgagcctagacttttccagccagccattggtccttcgctgcagaccatccatcggccacggttgccagtttctgattcatctcgatgggggagccagaagattgtctcttggtgttgtcggagttcagaatagagttttcatggtttgttcattcaggggggcgtttcactgttacacagtttgtgggaaaagaacacacttcttttttgtagaggagaagagcaatccaatcactctttgccatgatgatgaacagtaacagtccactacatatagtctcacactctggtacctacattgcccacctatcttatcaccgagtctcccgagattgtactacatacctatatcttttgtcctctcgccttgttaggcgggggactttggggataaaggttgttccagtaatctactactaccaggaggaaactcgctgacactgagtaaaaaaaactagcccattctttttttctttcgtcgcctccaccgaattacgtcccaccctcgggaaagaaaccttcgtgtcatctcccgtgcccttccctccttccttctatcatgcggtaacacgcggacgcggacgggaatggacgaaccacgtctgtctgtcccaagccattttgtacgtccgaacccgccatgggcaatcatgaactactttttttattcccacgacggataccaaggtaggtaggtaggtattttccccttgatatctgcaacccccgttttccctaggtcgcatagaccatctggcacatgatgagccacacactgccggcttccttccttgccttcccgtacatgggcgcctgtgttacatactcggctgatggaatattccaaccccttttccaatggggactggggaaaattttgctcgcctgcttgccggccgggagcatgattgatgatggctgggaacaaacccccccccccccgcccccccgcccccggttggggagcttacatgaacagttagtttgtctatatcggatgcgggtatcctttgctgttggaagaactacctaccgaagtgttcggtaactgaagagagggtgtctaagaaggtgaaggtgacacacgctacgtggttgacagtcggggccggggaattacatgcgggtaggtagttgagatatgtaggggttggttgaaggtgggacatgggtagagagggagacattccatggaaacggtgaaaaaattcatatggtacaaatgtcacacatcaaacccagcagagggggtcagcggccgagaagtgggggatgtggaattcatgaatgggttaatggttaatcctcaacaatacctccctgatgtcagttggattcttccaaactgacgttaggtagctgcctacattttaacatattgaaaacaactccgagaaggccgggtgtaacgttttccatacatcacaccacgccactagactttcacaagagttacgactgttctttgtgttcagttggcgcggtacttacctcgtggacaagcacgacggtcaagggcgcggccctaaaaacccctagcaacttccttcagagaccgcggaaagctttacgcattttctcattcgagccatgcgttacgaagaggtacagacaggcctttctttttgatttatactttagttctggtataataagactccaaggattaaaaatacgtgcaccagaggctgaaccaagacccatctttaccggggacatacatcctccgtactttccaagctttcgtcccctcgttgtatcatcctccatcccaacttaccatcccaactttcccccatcatcagatcaactcaagggaacattccacacatcagcacccaatcaaagtaatcacatcaaatcatttattcccccctctataaccccccccccccatgccttctcctcctcatcccaacctctactcaaaattcgtagccccctccacccttcccacaacattatacctcttactaaaaaacgtaacccaatcattcaacgtccccttctccttctccgtcagcccagaccagtcggcatccacatcctcgacctttgtcgaggtcttgcccagggccttggaggcgtcctttccggcaaagacgtggtaggcgccgccggggaggtaggccttgttgcccgtcacgtcgtagacgaggcccttgatggcgacgtagcatttcccgtctgcttgttcacctgttttttgagttagaacatgtgtgagggtgaaagggtggtagatataccgtttgctttggccagctccgagagagagattgggtcgtcctttggggggttgagctggacgggggttttgggttcgaatttgccggacattttgacagattttgtgatgtgggatttatgtgctgagtgaacgatgttagtggtgagatgtcgttgtgttggtgataggggggggggggggggggctgctcaggggaagctgatggcgagctcaagtggggggcggggtaaaatagctaccaccggcagaaaagggaaacatacagctttcggtcagacagaaaggttcgttgattctgaatagctttgttagatctggcggagcctgaaagcaggtaagaaatacttacgtactggagaaccctgagtcaagaatcttgtgattgttcagttgagacaacagatgaacctcgggatggtggcggctcgacagggatcaggctgggacctgggcaatgacgtgcagcggccgccaagaaagggacggtttggtgcctcaggcactattgtcttatctgcgaagcttccggagagagctgccaagagctatgacctaagctcccaaaagtttccttcaactccaggttcaaggggcatcaccagaagtgggaattgcccagctttcaccatgccggttccaagaatagccggtctacgggctgtaggagcgcagagactactttccacaccacgaagaagcccgcaaacagcgctcaatggagctcgtcaatccctcggaatcgaccagcaaggccgtctaaagtcgacaaccccaccaccgggcggtggacaagggacaggtcaacaacaagggcaggggaaagagggcgagcaaggagaggctcagaaggaacagttcaagaaggggttatggtcaacattctggacgctatggaagagggacatgaagcgaggatgggaaatcacgaaaaagacatcgctcaaacagacatggaaggaagagccaatcggtctggtcatcggcgccgttggtgcgacactctccatgtgtttcctcgcttttaccttttaccaatactttgcctactacaactctcccacgttcaccgttttccccgaggacgtcgccttcgcgttgaggaaagctctctactttggtgacttcaaaaaggacaccaagcgcgcgctgcattactacaagcaggctatcgagctctgccaggagcacaaactcgaccacttctccgacgaggtgatgggtatcaagctcaagctcgccgactggctcgagaagatcgacaaccaccgcaacgctattcacattctcgagaacctgctctctgactgccagcgctggatcgttgcgtttgagaaggcggaaaaggaggagattttgccggggcaaaagaactacaagcctcagcatgctatcaaggctgtggaaggtgagacaccgggcgaggtcaagatggttgttatcccaccgccaccggttgaggaagagggaggagccaagtcagaaggagaggcggctgctcaacaacagcaacaaccaccaccaccaaccaacccagacggcacacctattcagccaaaagaaactttccgcggcaagcgcacacgtctattgatgaagtcgattggcattgctgttaagctcgcctctctctactctgatgaccatgttctagagcgggaaaccgcccacgagaagctcgtctgggccgtggaaaccaacctcagagaactggctcgccggcaaaaggagcccctcaaagaaggagagggcaaatggatgacacccgaggaaatcggcggcacgctcgaatctctggcgcacgactaccaagcccaggcccagcatcacttggccgtgcctcttctcttccaagcactaagaatgtgcgatcaaccatgccatacagccatgcttagtatgttttttatttcatctcccttttttgaccaaattttcactaacatgcgtctagtgtcaaacatatccacctcattcgccgaacaccccctcctcccacccggtgaatcccccgttgatgctctgatggagcaagacgcctccaagatttttgctacagccaagcagcagcgctctgcgtacttagaggcggcggagagatgggcgcagaacgcgattgcgcaggcgaagaggacgacgggggaggagaggactgaggagtgcgatcaggcttgtgctgcggcggtgatcaattatgggtctattcttgcgctgcaggggaagacggaggaggcgaggaagaagtttgagcaggcgagggagatgattgggaagatggaggggggggacaccggggtgtatgccagggaggtggacgacgggttgacgacgttgaatggccagggggaggacaacaacacggcgaaaaagaagattatgcctgggggggttgtccctaggtagggtgggttgannnnnnnnnnnnnnnnnnnnnnnnnnnnnnnnnnnnnnnnnnnnnnnnnnnnnnnnnnnnnnnnnnnnnnnnnnnnnnnnnnnnnnnnnnnnnnnnnnnnnnnnnnnnnnnnnnnnnnnnnnnnnnnnnnnnnnnnnnnnnnnnnnnnnntaggtattacagggacaatttaataggcgttgcgcaggatctgagggagtcggacggcccaaacatgttccaatactggcaaacatgaataataaaaacccttatgacttggtccatgatcccgtttctcttataacaaagctagtttagtctttactaagcgagttgcaaaatcaacatgggtaatatccagattttaaaaccaaaactctaaagcaaacacctgaacgagaacatcgtgaacagggaagaagtatatttattcattgcggtaaataatcaactcggatagcagcccaggcctgatcgaatgcgaagtaattatggggggaaggggcggggattgtgactggggcggtaggggtggttgccttgagggagctacagaggtgtgcaaagagcagaggaccatcctaggttccaagacggagctggggattttgctgtcggttccctggttttaggaccaatggaagtggtaaatggacgcccgacagttgtcggtgatgggctgccgcagtggtgactaaccactttattactgccttgcttggtttatgtcagcggcccaggcgggtcttttgaaggtcagggggggacggcagttgtgcttgccgcacacacacggagagggagggagggagggagggaacatgtctccaacacgtgaagaacctcttggctaataacgacattcaaccctgaccatactgcagatatcctgctgctgctggtgctgtgatcattcggtcctttggtcaggagctacaagatctcattggacgggctgggttggagccccctgactgaagtaagcaagcatatcgggcatctagagggccctcggtctttatggcatctttcatgaggcctcgaatcatatatggaataccgagcattcctcaagtctggtactgctggtctccctctcgggaagctcgacctaatcgagaaggaggaaaagatacgaagtggccaccttaggtacatgggatataccttgaggaacagacctccctgcagattctgcagatatgggatcggcccgggtgtgtggaacgatgggtgctggttgatggaagtggcactctgaaagtggatgatgctacatgccttgggcagtttggttcgagttttgggcggaaccgcagggctgaatagagggttgaggctcaacgggagggagggagcggcagccaatgtccttgtcctcggtttcggtgaggatttgctcagtgcctggacttttgtgtgatatagctgttttgtattattatgtgtgtgtggggggggggggggggtggaaggaaagagaaaatgatgatacccctttctgtatatatggaaattgtaacgaacaatacacagctctccatgcttttttatcggccacttgtggtagagctggagaggttgatactgtgagggcgggggtgtcgtgaaaactgggcgagtctggagatggggatttatttggggatggctggacaaggggctgcttgtacgagagtttatactagattagttgcttgttatcacatagctctgggcattctatccgttgatagctctggtgtaaggaaaatggcgttgacacctttggttgtaagcaagcaagctgattagatagcttggttgtgagtacctatgttgtaggatgatcgcatccgatatagggatatgctagatgaagcctgaccatcagctgtttgttttttattctctctggcatttccatcgcagctttgtaacggctttttcggacacgatcttgtcccgttctccccccagcttgagatccacgttttgctttctagtattccatcgacatcatctgcttacctacccccctagcttacaatatcttgacctaagctttacgaatccttttccgcagcttggagttggatacttttcttgtgttccagaataggaaatatctagttatttatacgcgagttagccacgagtttcttggctgggcggttagccgtcagcatgtcattcattcattcattcatacctaaccagaggtagccgaaacctgcttggctctcggtgacccatcatcacatcatccattttgataatgagacctacctaggcttttcggtcgaggccgctgcagctgtattctttattccaaactctggacagcatgaatactactctggacatcagagagtgcatgaatagatggaaacccttggcatcggcccatgtaagccctcctcgcaaaaaatgccttgagggtacctggtagtcaaagcatacctaggcctgctacagtgtagtagtccactcccatcacgacagtctataacccctacttcgacggctcagcccgccgccaccgcaccaaactccccccaaccaaccaatatgaacctcttgaacaagaacacgcaaaagaaaatgacgacactatcagaccacttctgcgtcgtccatcccgtgtctcgatatgcaacacgatctaatcttccctctcccgcagacgacgacggaattgcgggatagcggcgagacatcaccgaacccgggcagccagccagccagccccaagtaacaaggctggcaaaggtacccgtgaaaggagggtgcggctgggacaggggttgtaaaggttgcaatcttgcatgaagaaaattgttaaggtcaccgctcccgtcgctatttgctgggaaacctctcaaaacacgtggagaatgagcaggcgaacgggcctggcttgcattagggtcggtcgtgatggaggggaggtgggtggtcttgggagtcgaccaatcggggctgcagcgcataaccaagactgaaatggaaattctgcgtgttcaatcatggtcattggaattcgacatgtttattgcaattgcgtcctcatcgtggcgagggcatcgctgtcgggggggatcggaccctcagggttactgccaatatggatcatcaggatgttttgtacgcaaagctacgatgctgatttggtctcgtgtgcaatgtaggtggcttgttgccgatactattccgtctggggtttgtggaaatctttccgcgtgtgtgtctccattaggatccaacctctttcaatagtgctaacaacacagctcgtgtttctgcatacgcaaggtatacttccgaattgcaggcccacgacgagaaaaagaggtggtgtctttcattctagaagccctgaggagagtgggcgtctgcaggaaatacgggtgcctggcctggatgcactacatggttgtttcggaggacagttttggctggcgatatgtcaaacagacgcttgaggctggccagatgaggacttgtgccgcttttgagcagggcaagggtccgtccttgctatgtgctccggagggggttccgaggacctctgtatacaccagcaagggcgttgagttggacgtccgaagtcgacctttgcatgctctaaagcacataccgcgctcagacaagacctacactgggaaggtaacctgaattcgatgtgaagtccaaccgagccagctcgaaggtcgcaactgtggctgctgataggttcccgggcatactgtcggtcaatcaactgtgtaacctgacgaaaccgttgtcaggtcttttgttgtggccacggggataagactctgagcgtgtcattggagagcttctggggttctggatgccaggttcttcatctgacgtgggatgaagtgttgggcacccacgagcgcatatcgaggaaccttgaatgttctagagagagaggaaggagaaggcatcggatgtggaccccaaccgcgctccgatggtgttgatcatgtaactggtgtgtggatgtgatcaaggcagagagcaatggaagttgataagcgtccataagccagctgtcagcctcggtcagcgtgtggggtaaggttgtcggggtgcctgccaaacatggggcgtcaggcgaccatttgattggttcattagtctcaaaaggcggagtcttggcttggggttaagcttaaatatggattggtccgagcgtctgtcgtcttcctttaggacactgagacccactcttccgaacctcctcgattccatctttgctactcctggcgtaagtggcagacatgcaaagtgtgctctaagcgatgcgcctaatacttcctcgatgtgaactgcgagcgggccgtctgcccgtacttggggtgacacccatcaatctcaccactggtcttggcagcccccaacgctcaagagagaaagtcgagatttgggcccccaggtcattttcggtgcccttttagcgagtccaagtatttctatgtgagtacctgtatgtctgcgggcttcgttgacgtttttctctttctcccggcccagatatatccagggatcagtcaaaccacagaagctccacgagtcgagatctctgcatatcagatctggttaaggttatcccgtcagagccttgtttgctgcagtacggccatgcattactcgacgggccgctggctaataaatcttggcgctctttatcgtgggctttgtgggtgtcgtccaagtcagctccggacccagaggtatggttctgtcggaacaccaacgccacaaaggctactgcgtcaaccgtatgctatacgatgtattgtatcttgaagctgcttcttgtacagccgtttcttgctcggactgattagctgaacatagcaccagctcgtagcttggacacaaactgggcgagagtaaagcaagctagtttttgcctcacgataagaaacggagagcagggaaggaggggactagacgcaacgtggtcaaccgcacccttgcatgaacctgcatcggtgccagtaatagtaatatctagtgagcaagatcatgtatctaaatctctgcaaccccgctcccgtagaggccgatagccgaatatgattgtctccctcgatgcctggcctgattccaggttgacattttagaaacactatgtttggaatcactgttaagaagtgccccgcaagaaccccggggtagtggccaagggggggatcaggattgacggaaaaaagaccctgggaaatcgatacatctcatcttcaacagcacaacatctaccccacagacgcagaccatctatcgtccaaggtatgttcgacagagacatgatcccaggcaacaacgttttcagtgctgccagtggacggccaagctacaccttgattgattagctcccagccacatccagcccatattgttcaggagggtgtttcggcagctgccggtctttttggccatgacggcccccactgaccagaaatccccacaatcccttcccggtctcattgccgtcgagctcaggggacgcgtacctcacgctgggcgcaatatcgagcaggccttttccgtgctcaagttcatgaagatagatcaggtcctgcgcagcagaagcacgagaccggcgtgaaagcacaccaatggcagcaagcatggcgcaatgtctcttgtctcttgtctctcgtgataagataatcagcctgggtatcttgggaaggtggggatgactgaggtgtagcatgcagtttggttaagcttttcgaccacgatgaattgaggaacgcgtgaaacggacagaggcatccgcgctccactggccgctgccccatactcgtctcttccaggttgtttttacacctcaacatggaacctgttgccttcaagaaagaattccaatgatcgccgttttctggctacctaccttacgtattacaccgacaatcctttaggtgaatcccgtcggcagcggcgcctaatcaggttggtgtctcccctgcccgacgctagacccgacgtctcgggcagcgatttctacgactgggcggctcgtataaccgcgtccgccatcaccatcatcccaccaaatcattagttctagcaccgtttcatcccccacagcagaaatccaaacaggaaaccgtttcgtcttctttctgcctccaggcctcacattaccgcttcacgagagagtagacgacatgtttgtcatcctttattccgctgcgaaaaattgcaatgttgctgacagagatggacagaaggttgcaaatatgcaaagagacgccttcctccaccaatcatgagcgccggacggggcgagtttctagagcaataccttggcggctgaaaccctcttgttcaacagcgtcccattactcagtgcaggcagccttggggagtggagatggtgttctgctccaagccttacagggcagcgccgtccagtggcgcgggtctaaccagctttcggcacgtacacgtcctgtctgtcgatattgctctgttggaaatgatttcgtattgtttactcatcatttgctttgttaaatccgtaacgaaacctgatattttgacgtcactctcgacaacaccgaattcccggccgctgtcattctcgatgctcgcaggcatgacaaggatagaagattatgaaagcatggaacacctcggggcttcgcgctatctgctgacttttgtgagcgctgcaggtgagagatatcgtgagtttctactggcccatcagcatagctcgctccgaatggggaaagtagggctgaattggatttcacaataccgaacggcggccccgagaatacaccgttagtcggttcaatcccaggaggaaccggttctctgaattgcgtgtgtctaagcccgacatcacctcaacacttgacctatggagaattgttcccaaggggactcggataaggtagtctacagttctttccggccgtcactttatgagcaaagtccctgcaaaccagacgcattacaatgcggaagcatgtgcagaagggcggtctccagattgcgtcctggggtcccatctcatgcagctcgcggtacaaagtactttgctagcttgactgacccctggaaccccccccccccccgctccccctccatcatatgctccccacttgggacccctgttgacagcccaagatacattgtacacacgaaggagttgcctcgactacatcgacatgtaccctcaacccgacgccgctgccatgcgggttggcctcgcctcacaccgtggagacctcctgtcaacagccgttctgggtccggtatcaggctcttgctggatataataacacgctccccggtcttcatcagccttggcctcgagacgcagcttacttgcttcactcatcctcactttgaccacgtcaagtcttagtcacatactcgccacctgcttcttgctttgtagatcctgacatacatcaagcttctcattaacaacgacatggaagattttggaagcgctctcgacatgccttcaccttccaactcactatattacgtgtatggggacggagaacactactcctctggctcacaaagccccagcaactcgaccgtgagtctttattcatccatagaacggacagtgctgacagtcaaatcaagtacgacatggcgtccacggcagatctcactagctttgccagcgtgtacccaaatacggaacacgaggaggagtcaggaccgcaggatcaacaacaaaagccagcagccaagagaaaacgcgagaaccgctacaagaatgcccctccctccgtcttgtcggtaagtaaaatcctcgtgcggcggccaattactgaccgtcacgctcgtgacttgacccctccttgcttccgaatatccactgacatattgtctgcaatcagaggcgtcgagcacagaaccgtgcttcacagagggcttaccgggagcggaaggatcagagaatcaaggaccttgagcagatgctcaatgatgccaagcagcggaacgatgttctcaaccaggcctacgcagcgctccatgctgaatatgtctccctcagacggtctcggctcgaagaccagcaataccaccaccagcaacccgatttgacatatggtaactcgcatcacggcatgggattggaggcgacaggaaccgagggactggatatggagttgtttgtctatccggatctaaatccaggatattcgctcaactgagacaatacactcggccattccttctgggccggccgaatctcctcgaggattctatccatcccttcggaaccgccgaagcatgattcgtccggacactctcaccgaggatacacacattctgaagacatgcgctgttttctgctcgttctgagggcttgacgagagcaggctttcttgtgctgcggggctgtcctgttgtggttggatatcagcggcaatcacgtcactgtgataggaggagcgcctgtcgatatcgaatcggagagggtgggtggctgcatgttccaatcgacgaggaagaagattggggaatacaccttccaggtttgattcttcggggtgaggctaccccgaaaacagaggccatggtggacggcatgaccaagctggggctcaaacagacggccttgctcggcatctcgcggaactttccctctgcccgcgcagactggggggcatctcggttgtgctcttttgcattttgggcttgcgtgtaagtggtgcacacagagtctcccgctttgctcgactcaccgaattgggggagcggggcatatgcatgcatgcactttggggactgcgggcgtgattcactcagccttctttttcattttggtttctgctctgtactacaaatggctacgataggcaggagattgggaggcatttgcttgatgataccacgggaaattagtatgcggaggaaatatatatatgtgtaattctattgatgatatctcactcatatgattggatagatgatctctataactgtcatcattccactgcttcaatagggaaatattaccacaatggggagcttcgcttagcaaagacaaaagaagaaatgttgactaggtcacatgtctggttgggtacttgataacatttggaatgactggaatatggaaaacaagccgaaaccacgggtgccagacttgggaccgtacatttgcttcacaagccacaaatctcgcatgaaaccaaacgattttatgacgcaccaacttacaggaaatcatcaagttcatgacgcctgtcatgatggcttagacagaccaagactcagattatcaaggatatatcgtcttgactgggttcatgtagactagaatctcaccaggatacgctgcttacgcttggtaggtacacacgtactcgcagagaaatcttactggctgggcgggatctaaacgcgcctgaggaaggcgcagtgtcttgtgtacagttttcgtcaccgagggggcagagttctgattgtgtggaggtctgtccatgatatcaagtgcttcttacctaccggcttgttcttttcgtcataggtaggtgtgctgttgatggttttagaggggaaagcgaaaacccggggatcagtgaggcttgcttcgcgccagcaagtttgagcaatgagagaggaaaagatcttgttcctactacaacttcttcctttcaggctcgcaggtgtgtggtccgatcggggttaggtgctgagcaacggaaccttccgaggtcgtacatggtataaagatgttgtactggcaagaaaggatgcctactgcgtaaggcgccttcgacggggtctgagacatgacggacgatattggaagccggaaggtcagcggaattgtcggtattggcgcggatgaggaagatgaagctagtgggcgtgtggcgtttggtgggttagggtggtgtgtgtaggtaggtgagcgctaaggttccggagtgggtgttttaggattggttggaccggagatgggaaaaggaggtgatggcacccgaacgacgacacaaaacggagtttgggcgcggccgtggatgggggcttgaggttgaccaagttgttcgatgggtggatgatggcgggggatgacatcgtgcctgtcgatctgggtgtgtctggtgcagaaggcttactttgttgccatgctatgcttcctcatcctaggtagctgagtgatagcctggaaagctggggtagggctttggatatggaatgacggccgtgatggtcatcatcgtcatggcataggacagccataattgcggacaactggccaggggaagccctgaggggggttgaataaggtgctgccttgagttgagatgtaagtgtcgtatagtgaaggcggtcaggagacggagatagcgagttgacgatgtgcaaagtgctgtgtcctcatgaagtttcgacgtcttgggcgacatgaagggaatggtggtgttgacggtatatcgtaaaccaaaagggaagagcacaatgacggaatcaccgttatcggaacaatcccgcgatcctcatgcagtatcaacctcagctgggacttggcaattggctgtcactttgtgtttctgtttttcgttggtttgcaaggtatattctgtgagggggagaagatcaaatcaattttggtgtgcggaatgaaaaagtgtgggttctgactgtggaaggagcgatgacgttggcgttggccgttccttcctcagtcagctctgaagagcatgtatgtggacggtgacttccctcttcgaccacgcgattactggactgaagtttttcacttttttgaactgctttgcaagtacggtcatttccttcatgtatctgatacttccgttgaaggttcccaaagtcaacaataacgccataccagtcctgtcagcactcttcttgatttcgatcgacacagcccgggtggctttacaatacgattgttgacgccttgccacatataatacgcttctcagcagtccttttctgccatcagccaagtcttgttcatggaagccttgcccttcaagctgctcgcccggcctggcccgctccgtagatgagtgcggatcgctttcgtccttggtgttgacgatctggatgctgacaacaccgtttctggcgcaggcggcaactttcgactgcccatctatcattaagagcgaccgaacccatcgttgcctgcccgaataccgtcataattgacgggattggacagtgtgttcgccgccgccccccgagccagaatctcacgtcgaggttgcaataccatgctggatttttggttgcctcatacgtaccaccgccatccatccgttacttatcaggtgtcagagagtcctgaagatggccgagtctagctcaataggggaaaaccaccggtgtttgttgctgtcagctttgagcatcatgtgacaaccgaatgggagtcaacaaacattttgcaaggtcaacctccttttgttacaccctggaaactccttttatttggaataaaggcggctaacatgatcccagacaaatgaaagcctgtatatgataagggcacagccagaatctcggtcgtctagagccaacccagcacccaacaaagcagatctgatggccggtcgatggcctgagcaacatattgcagggtgttatgatgaaatggcatgagtaagccacattatacgggaatacccaaccgtgctagtatggccggtcagacctagtagctagcccccgtgcttatgctgcaggatgatatgtttctggtttaggtcatgtttcttgtagtcattgctcatctgtagactgaccctattgtaaaacttctgctactagtagagattggtaaaccaagggtttcattctaaagtaagtgtacatcgcaataattcttcatcggtgtcaataagctaacaattattacatggcaggtaataacagtttgtcaaccgcaaaaaatatgaaaccccacaaccttgcatttgacagattgacaacccttatttttatttcaggggcactttgctttgattatgtccccggacgctttagtctcctcgagagacgttcaagctttgctgcgttgatctgatcaacgacatggaactttcccgcctatactgagcttgttctgttcgcaacatccaacaataaacctccgaaagccgatttcaaaccaacacaccaagatacacgcccaagagtagtaccaccggcattcgaccacagtgagggatgaagatatctttgatcgcattgcggtcgtcgatgttgttggctgggtagcctataatgtcgacgtggtagttctgtgctcaagggccgggaaagtaccagttcgtttgaatggctggtgcgggtatctatgccggcgtcctcaatcaaaccaacgatcacctctgcttggatcgttgtgctctagagaccgagccactgatcctctacgagcttgagctctgattcgagggggctgttcctgacgacgataagctgctggtggtgaaaggtgactcgttgttggtggagttgggtttgctgtgagaaagatctcggcgagtctgtgtgaagtcggtgcctcttttcccataccatttcccggacgggagacggctggttgaacgaataggggatgaggcgagcatgacgaggaactcaattcggtggctttggctcagggagacgagggtgctataacctttgggcgggttcaaaccccccctttaataggtgaggggggatgccctcagcctccatgttttggcccccgacatgatgtgtgatcgactcgccgagctgggtggttgaactggttgctgaatcagcctcttacgatctcctcactggcattcgaccacccacgtcctccaaatgctcgacgttcagcggcagtccacccaaacgaccatttgtgcaacccatgaatatgcggctagatggacagaatcaggatagtcatggcctagggctggactgtaggataggagatggtctcggcatcagcggtatgtgggggttggcgcaagtcgactgggtgttggatgacgatggcgtcgctttgggcttgctgcgtgtcagcatctaggccgtcccagcagacaagtgctgatcagcgaacggcggccctgtgatatgatatacggcagcggcaggtcaaaaaggcggagggactgtgcagaaagagcacattgcatttgtcacggatactacaggtcacctctcacgtgagtttgacggatggtggtggtggtggtggtgatggttagccgtggcttgccccgactgagctgagcaccaggatcaataccaggtcgatcgccgtccaggggttctccgcattccgggagacggtcacgctaacaaacgcccccgaacaccggggcggacttgctccgttcaacggtctggataaggggagttttttcagctcgcccggtaccgaagaaatagtgaagtggcgggcccccaggctcgaccgttgcgatctcaacgtcgatggtgttggttccgagaaaagaaagccccgatttagcagagagcctaccccgacttttttttttggtggcttgcggctggataaaaacggcagccggcacaacggtttttcttctcggttgcgagtgcaacaacgttgtttcttggggtgcttttcccctctcgagtgttccccccatttaccctaatatccagggtactttttcgcaaccgacctttttaatatggagagcgaatccctttggacggttgttatcttggatcaattggaacaggcccggacttgctatagtgagaagtaggaggtactatatgaaaaatgtcttggatcagtgtttttttctgggctggctggctgaggtggagattaattaggcaggttgattgatgggacgcattccaggtgttcttttttgtccttctttttctagtttgttaagttgatgcttttttctcctcttttgacattttttgggaagtgggtgttgagaaaacgacgatatcgcgacagcgtttgcgaagcgcaacgagcagtgaattcttggcgcaacaaaagcgacgctcaccggcagacgcacacgtgttacaacagggaaatactcagagggaaaagggcgacaggcttgaaagaagcgctgaattaagacgggtcggacaaaagtcgggagggaacgcggtgggacgtcaaagtcgacacgtataagcgagactggacgacatcacaccgctcaggagtcgtttgggagcattcatctcgcggtttccagcgaatcaacaacagaagttggaagttgggggccgattgggacaagagggacttcagcatggcactcgacgacaaaatgtcgccatcaataacaacaacaccgatgggatcgttacctaccctccgacgcaaactgaccagactagtcctcactcgtggcatattcatcaccacagtcgtctacgtctttctactatcactaatagtaggggtacaagccgccctgccggcagagtttacaaactcgtttgatgggctgggagaagggggcagcattgggttgacgtgggaaggggtgaagccagagtactttcccttgagcatcaccgcgcaggtgattgataagggagaggattggagcgggagtaaagttaccgtttacaaggttaatatcactggtgagtcagacgcccttctttgcagtcgtgatggatgatggctgggagagaagagaaggacgatatgatattatgatcaagacagagaaggactgtgtcgaaaaatgagggggcttcttcgtggctgttgttctcaagacggaatgatatatggatggttttggtttttagcgatatattgcggttgtgcatgatcgtgtttggcttgaccgagtgctgatatctcatcttcacaactccagccgcagcaacaggcagctcatacgtctggactaacatgccccgccccctccgatggatcaagtcagggctgtaccagctcgaactcaagccatcagcctggacagatgatggtgaagcgcccgtgttggcgaggtcaccgtttttcagtgtgggggattacgtcccgcctgctccgagtccaagtgagagttcatctcctgtaagttttatttgacctacctaccttaccttggtaccaatggatagtgagtgaggctgacatgacatgtgggaaaggaaccctcgaaaggggataaagagtcgtcgtctggcgggggcggcgtgagtaagccggttgctattggggtgggagtcgcgattggtgtgccgagcttggttgggttggtggttattggctggttttttagacggaggtataagagggcgcgggcggagaagaggaggttgaaaaggagcgagtttgttatttactgagatacccgttgaatgtgaagaggtgtgagtttactcctgaggggccgagaatcgtggacccgggggcaggcggcatgttgagaggatgattggttcggtgggttcggatgttggatgtgttgttgggtgatgcggagtggtatgtacctggtgagaaagggagacgggaataagggggacccttccgacgggaggtgaagctgacgggaaagcttatttggtggtgctgtgggtgttgtgccgcaattcagggacgactgtgaagggggggtgacgttgtgggttgtattatgcgggatatgggatgaaggtgtttgggtgatcgattcagggctgattcttcgagatggaaaacacggtcaggtattgtggtcttgctgttgaaccaaggttgacaggctggatattcccatttaagggggctcttgatgagagaggaaattcagtgtgttccaaagcatcgaacggcatctcggcacgattgatgatgatggcagcaggtgggtgagatgtgtaattcaaaccgcgcgcctgcaatgaacttgtgcaagccagtgtaaggaaggcgcgagcgtatctgtggtgccttgcatagcgcattttgtggtggtggtggtgtgcttattcaagatgagttcggaaagagcggaaactattttgactgcgcccactttttgacatttgttccacttcttgatttttggcattttgtgatagcagtgattttcgatcattatctggagtggaaaggggatcatcgatttggttactcgatttcagagcttgcttccccagtgactggttcaagggttcaaaaagatcgacacagttctacagaatctagaacttcaacccggtcggttgggattttgattaagctcatgttttgaacaacgtctctcctgggaggagcgatcaatctccaaaagtgggttgcggattgccgctatcgacaacgtcaaaagttctggactttgggtttaagatggcggcggaaatttttttcatctggtctgaaatggatggtggttgatgacaggtgcttggctgctcatgcgtgctgtaccgaaccatcaacaagacgaggccctggctctctggcacagccaacaaaaaattcacaactcatcacgtcggccagtcgtggaatttgtttccttttgctagctacccctgaaggaggagggggggcccgccgcgcgcagacgctggcgatgttcctgcattcttggcccctcttggggaccccactgtttgtttccaagaatggaacctccgcaagggcctcgagggtcccccctgggcttaccgctccactcaaggtcttttccccggtaacactcgagcgcttttcgagacacgaatgacaccctcccgtcgagcacaggtcatggggtgattattaggggttcacgatacgagggccgagccattgggagtcgaagtgcgtaatggcacacaagaagaaactgcttgttggtagacgatgggtggtggtggtggtggtggtggttcaatcaacaggcgaagtaaagcaaacaaagggtcaaagtgcagaaggcatgtcgcttacactgttaggttggccaatgagaagaggaggaacttgtcccctatccaaattgaccatcgcaactccacggcgtcgagacagagatggagccgccggccgtgttggcgagaccgcaacgtcccgcaggggatcccttctcaacaggtcccaaaggggaataaacatctcttggtcagcgctgccgaaacgacgggcgggcccggtgacaacactgcccaggctcccggtgatggaggtgatgggggtaggtgtgcatgatgatggagtccgatcccatgccttgcctgctgagcctcgcagtctccgtgcctccccggcacacggggcggccagcctttcgcccctataagccgtgtgatgccaccacgagcaccctttacgtccctttcctgtgcttgatgcttctctccagccaagctatccaagctgcctcttagcaacaccagagcattcttgctcgtcctctgacgtatcgcacgtccaacattcgttactagtatcatcataccaccgacattctttatttgcttcacagaggagaaataccatggctccatcattctctaagctgggcgcttttgccctggctcttgcctctggcgtcactgccacccagaagtacgtcctctccgaggagtacacaccatccaaccttttcgagaacttcgagttcatggagttcaaggggaacgacgaagaccccaacaggggacatgtacggtatcaaagccaggccgacgccctccagcttggtctcatcgatcccgtcaacaccgacgacgtcttcatcggtgtcgactacaccaagtgggccgaacatggccgtgagagtgtcagaatcgagagtttgaactcgtacagcaagggtctcttcatcgccgagtttactcacttgcccaaggccgtttgcggtgcctggccagctttctggctgactggtgagcagtggcccacgcatggcgagattgatatctatgagggatggaacttgaacccgcagaacaaggtcgttggccataccgaggtgaagaccgctggtgtgtgcaagattgacactgatgtcagctctggcttcgtccattaccctgactgcgatgtcgtggccgagggccagcccaccaacgctggttgcgcacttgatgagggtaacaatctctttggtaaccccaacggtggtatctgtaagtgctccacatccccaggctcttgacaccagaggcaacatgctaatcactgatgttcctcaggggccaccgagtggactgagaccaccttcaaggtctggagctgggctcgcggcgccgagccccgggatgtcgccagtggatcgcccgatcctctgagttgggggccccctagcttcgctcttactctcaagagctgcgatgtcagaagtgccttcaaggatatgcgcatggtcctcaacatcaacttctgcgnnnnnnnnnnnnnnnnnnnnnnnnnnnnnnnnnnnnnnnnnnnnnnnnnnnnnnnnnnnnnnnnnnnnnnnnnnnnnnnnnnnnnnnnnnnnnnnnnnnnnnnnnnnnnnnnnnnnnnnnnnnnnnnnnnnnnnnnnnnnnnnnnnnnnnctttcggctacaaaaagacctatcgagccaatttgacacgtgctacgagtacgtcagggatcacggcgctgactttgaagacgttttctggaaggtcaagggcatcagcgtctaccagcttgaggatgccgctacctctaccagcaccactgtttccagcaccaccagcaccacccagactgtgacctctgctgagcctaccgtgaccgagactgcctctgagactgtatccgaggagcctacttccaccatcacctccgactctgaggagcccaccgctaccgagacggctactgagactgccaccgagtctgccgccgagtctgctaccgagactgcctccgagactgttactgagaccacctccgagtctgccaccgagactgtggaggttaccactaccagcgagaccgccaccaccactgacggccctgagccaaccctgaccaccgaggcccccgagaccaccaccaccgccagccccggtgatgaggatgaggatgacgtctgctcggatgacgaggaggagaccaccaccaccgatattgctactgctactgagaccgagaccgctgagcctactggcgagcccaccgagactgctgagccttccgctgagcccactgatgctgagaccactggcgttgaccctaccgagactgccgtccccaccgagaccggttccgacgaggtcaccaccactgcccaggagttcaccacctcgaccatcttcgccaccgaaaccttcactgttacctcgtgcgctcccagcgtcacctcttgccccggtcgcgtcgtgacctccgttatcgccatcggcaccaccgtctgccccgtcactcccaccgtcaccgccacccctgagcctaccgagaccgccactctccctgacggctggaccacctccaccgtctacgccaccgaagtcatcaccgtctcttcctgccctcccaccgttgtcgactgccccagccgcgtcgtgacttccatcgttgccgttggcaccaccgtctgccctattggtagcgccaccgttccgggcgagagtgttcccaccgacgtccctaccgtcggcgtgcctggcgagggtgtccccactgacggcatccccgtcgagggtgtccctactgatgtccctaccggcggtgttcccaccggtggcatccccaacatcgacaccaccctcaccaccctcctcacctcgaccggcaccaggaccgtcaccctcaccggcggtgtcgagcagtccaccagcgttccccccgttgtcgtccccgtccccaccggcggtgcccccatcaacagcggaaacaacggcacttttgtgccccagccccccaccaagcctgcgtatacctactctcctgaggttacgctccccttggtgcccatcaacgagcagattcccgctcctgggcctaccaagctcccgattgttgaggtgaacggtgcgggcaggatggttgttggtgggttgatgggtgtggttgctgctttggcgcttgtgctttaaatttgttttctgatttattttttcattggatgagtggaggagatagaggagcaagttttagaaataatataatttcttggataagaatttttggttttattgttttttttgcatatgcatgtgttagcgtagcgagttgtctgtctgtctgagtgtgtctcttttgtatgtaaagaagtaaattgaagaaggaagatggtaaagaggttgagctttggagatgatcctgatcctggtgttgatgggtgtttttttgttggcgttttgtgggtcggtttatgcctctttacttacctccaggtcctttatcctcgttgttatacaccacagctactacttttcaactcggaagttctcacccagcttgacatgttggccccccagactcctgataggacttgtcctagacagtggtatcaatcgtgcaagactctcagagtccgactctttgaaggggtatgtcatccacctgtctctgttctgtccaagctaagacacgctgtttacacaaccctttgtgctccatacatctgaaacatactctttggcgtagcactctttctcatcacctacctcctctctcctatttaccttcccgacctgtaacctggcttactttagtttggacttcttgacaagttaccaaggccctcatttcctctaaatgcgtcttgcgaggctagtttaagctgttatataggatggtgattatttgtacatgcatcttaatcagcacacactcttgtttgcgcatgggcatggataaagccaccgtcatttaccatagtaggatgcacaatgaggacgtgtatataaaagcagcacaatgtcttctatctactcttgcaaaaacaaaatatacacacggctcagaagcaaacagccaccctcatccggccagcgctcacccaccttgaacaaaaaaaaagcaaacgtatatcatgactatgtatgacccccctcacctcatcccatctaaaacccccccagcagtttctcaacccccctacccagccctttaaacccctcccccctcgcctccctctctccaatctcaatcaccttgcccaccaaatccttgttcacctcctcactaaccacactatccctcctgtacccctcgtgccccttgacaaactccctaatccacctcgccgccgtccacaactccccattcgccctcttcctgatcaagtccaaatacctcgccaactgacacctggtcgccacgtccacattgaccgagtccagataactctccacaagcgggatcaaacccggaaactccccctcctcgtcgccattgatgacctcgttgacagtcatgagcttgtactcatcctccaccggaccaacaggcgacggagggcgcgagttggccctgctgccaccgccaccagagcggggggtgttggtgcctgagcctgagcccctcgacggccgggaggagaagaggttacgcctaaaccaaaacttctcctgaaggacagcatcccgcttgtgggcggtctccatgttttcgtcgactttggtgatggggatgtagaaattgaggtcaaacgacaaaatcaccctcgtgatgaggaccataaagaccgaaaaggccgcgttttcgaaatcggtaatttgaatctccattgggcggaactctaccctccatccgatgttgttgtccgctgggggaggcttgaagcgcatgtgctgccagttggtgctttggatgttctcaaagtggtccgtcttggagaggtcgaggacttccaggtcttcgttgaagatgacgatggggtcgcggatgaagaggtgagcgaagtgggtggcgaggcggtcgtccatgccgccgtcgaggagctgctgcttgatttcggggtcgatgactaggttggggtcgaggtattcttccctcagcctggggtcttcggagatgtaggtcgagttggaggcatatctcgacttgggaatacgccagcggtcgttttgtagaggcttctcgcctaattcttcggcagtgcgatcatcaacagctttgctgatctgattccacctcacatcggtatcggcgaggaaacccttgtagattggtgtggcagccgtcagcgccaggaggatggggccgaggggtgagagctggtcgtacatctttctaccctcggtgatgttctttgcttggaaggtgatctgaagacagcaagagcccatgccgaacgccatggcatccatgtgaataaagttgtctggcgcggcgccattccggacgtcgtcgtcttcgggccagttgtgaaggtcgtagttgacagttgggtccttccacggccatggcgtgttctcatctctgaacacaggtacgttgacctgtactttgcggccacgccgggatcgaatgttggcagcgagcgttgggaaacgaatgtgaggattggcgatttcatcggggacaaattgtgacctcagtttgggtcccgagactggataatggggttcagtgaaaacgccagggctacctatcctggggaaggttgtcaaggtgattgggtactcattaggcaacatgtgatcctttgcaatggctcgcctgcgtcgtgttagaagaaggattcttactcgagctgactggtgtacatacctcaacttcatatcaggctcaacatgcaagagctccttgaagtcgatgccccatggcttaccaggggtcgcttcgagcataaatctgccgaattcgggatggaagactggggatggatacttgtccctatgacggttagtacggacggtctcctcaacaaatcaagcttctcttactttggtttcgtcccaccgggggaggcagggggcgtaacctccttggccagatctttgtctccagccagagcagcgaggatatcagcctgcctcaaagagagcaaaaccttggggtcatctttggaatatgtcacgacaaggtactcgacctagaagtgtctcagcaccagtctacgaatcagcactcgaagataaacatacctcgtcaccccaaagcatggcatctctctccttgaccttggccttattccatatctccagcaattgctacaggacaaaagcaagtgttagctcgtcgctgaccaccaaggccccggctcttcccgagatttccatgcaattacaagtgccctcactcaccttgatgccccaggccctgacatgatgagccttcgtcttcgcctctggccaatccaaggccgttcccagcgccctttgcagaatatcagcatgacgccatacatagacgagagcgaagcggtgtggtgagatgtgtatgtgtggtgcgggcaggatataaaacgggctatacgcacaagagacccatggtttacgaaacggagggttgtcgtgatgtgctgtttagtcacgagtgaaatgccgtcgctttccggcaagataaggctccaaatgttccaacaagattggatatttcagggtccagcaagctgtaatacgtgtaaatccggatccctgaaaggatggtgttgtgaccgagagagaccgaaacagagggtgtgcgtgatgagtgttgcaaagtagtgaagagagatatcgagccaatggccgtccagctctcacacaacgtattgggcgggagttccaaaaaattggataagagaagaagtttctcactcttccacctgcaacaacctcgctgatgctatcaccagaacgggatgtgagaggcaaagacaagagatgccaacccccctttttaccccggattccctctttttcaacctttcccctaactcctcccctcgctgcttccagaaatgcgccttctctatttccggaacgatggtgctatgcagtgcgtgagcgtgagcaaatgcgtgtagatggttgcttccccccctcccccagtaacacaccccacgttccagttcgcagccttgcagctattcgctaccgcttggcgggttgtggcagccgaatcagagtgtatgacgctgctggcgtcttgttggagtatgcaggtagcaaaggcgtcatccagagcacgcaatcgttctcggctgcaactgggccaaatctgttggcaaaggtttgggggtctgctgtgagatgtcggaaggcggaagacttatttgatcgtcgatgcgagtgagcgctgatataaagagttgaaaaaataaaagcatgaaactggcgagaaatgagttgaaagtcacaagtcgggatatcctgtcttggttgtcaagggagttatgagagcaacaattccccctctttcgttccacgatccgatgtttatataagaatgtaccgaagttcaaacaatatataagcccgcggcaataaaaatgaagagaaaaaacacaagccgtagtttcagggacctgctttaaatttttcgcgttggcaggcggcaaaaccccaacaaggggactttcttcaaaaagaacaatggggctggaactactaccgagcggactacctttttggcatccactctcgcactccctgtctccccgaaaaatggacgaaagagttccgacagcgggggatgccaatttttttttctactccccttccagactctggaaaccggggaaattctcgagacccaggtgttgttaagctttggccctggtggagtctggagagactgacacttccgtccatcggacgacccagagagagccattcagacgtttgacaaagtaagcagcaactaaataaactgcgtggagctgaataatgacaacaacaaattgtgtactgcaaagtaaacaaccgctcggctatctgcccgacctgggctgctgtctcctcagatcggagtcttgtctacaagtgcttagaaatccaaatcaactcccgattggggtaggtatgcgcgcatctaatcgctcggaaacatcccgtggaaaacgtgtgtgtgcaacgtgccaacggcgactgacatggtaggtgggttcgtccgtcccccgggtcccagagaaggtgtgatggaatgtttcttatgccatggctagccgttgggacgtttctttgcttccatcaattgacaggaaacgacctgcctgtacttcttggagggaatgacatctctcgggtgacgggcagaccaccccccacaatccgcagagaacagggagtactgcggggttttctctttgcttatcgataaacagaggggtaacttcgtcagcgagatcgcgcatgtgaaaaggcggggcatatcccagcttaaccctgagatggttagggttattgctgcatctattatctgtgtgtttacaagaataaatctcaggctctccttgttcttatccccgtctgcaattgagattgaggcctgggcgcccctcgccacttcaccgactgtcaaatgccgggcaacccggatgtttcttgcgatctcatttcaatcggtgatcgttggaaagtcggtgcttcgtgacaatccagattcaacaaaatcacatactttgctcgagaaaggctacagcaaaagggagacagtggtgaaaaggactaattttctgtaaactctttatccttttgtacatgtccatccctctcttgtctctaccctccaagcaattacagaaatgtctctactatatatacacatctttctgtccccctcctcatcatctgtgccgccgggtatcccttgatactttcccacaaaagaaaacgccatatatgcttacaatgacctccctccctcctcatgccctttctgcatgcgtatgctcgctattgtacaatgtaataaaaagtgaaagaaacgctgataaccacccctaaaagaaccccccccccccccaaaaaaaaaaggcttgaacgcccagccaaaacgacaaagaaaagaaacctcatctcttgacagtttgtccaaagaaaatgccatctcatcataaccaacatcttcctgttacctcacattcagaaacaaatcatcccccctcctcgtaggcgtcaactcaggcacccaccccggcgtaattggcggcagctcatccggatcctgcctttgccagtttgtcctctgtgcctttttctggtaggaatcacccgcgttcgccagcgtcaacgccgctgccctgtccggacctcggcgtttagccagcagcaaggaggactggctgctgtgggccgaatttgagccccctggattggacatggctactgcgctgtcgatgggggtttgagaagaagatgttgctcctgctggggaggggtaagacggggggatgtaaggtttgtattgttgttgttgttgttgttgttgttgttgttgttgttgtggtcgagagaggtattgttgcgggtaagggggttgggagtaaggtgggggttgggagtattgttgtggttgttgagggcggcgttgttggggttggaggtattgttgttgttgttgggggtagggccgttgctgttgctgaggatttggtcgttgttgttgttgttgcggctgctggcggggatcatacggtggccgagtttgctgcgcaggtcggggttgggatgatgatggccctccccagtatgaagctgggtttgacaacctcttctggctgcggaaatactggtcctcaatggtaggtcccccgcgagtgtcaggggatccagtcctcatctgcgctggattgcgcactggcactgggttgagactggcgccatatgttggccgtttgggcccttggggagcagctggcattgaatgccctgggtgccagacattgtactggtgtcctcgcggaagcaagtctgatcccctgctgcttctactattcctatcggctctctcaggaacaggcggtacctgagcagcctcggtgcgtttcctgatctttgggtaagagacaggagacttccccggcgagataggcgtattgggcgattccaccacaggcgacaagtccacttgcatctcatcctcaataacagcgtcatcctcatatggtgaccgcacaggtgtctgtgccccttcctgagagttcctccgattagccctcctcattgaccgcctcttgctccgatcgccagtcagctcccgcccttcccgcatcacatcaaagtatgtatccggctgcttgccctgtttccttcccaactcaggagagctgatgagagtctcggcagtctgcgaagacctattggcaggattttgcctcgaaacttgcggctcgcggcgttggtccttgaatgcgatgggagacccgagcatcttcgcgctttccttggaaggaattctcagaggtgacaccaaggcgtttggtgaaaacatcacgtaggcatccttggccctttcagctctcgtcttgtgcaagtcagggcttgggagctcggcctgagcgagaggaacggaagcctgctggggcttcggcagtggaggcacggccttgttcttgttgacagaaggctcaggcctctgttccggtctctgctccggcctttgcgacggtgtattccgcaacacccaattgcctcccttatcagcaaagtacatggctgtcgcagactgaggatcgctcggtggtggcctccagacagaagtctttgctgttttcgccgtctcgacctctccatcctcggcaaattcggtgacaacactatcggtccggctggcaggaactcgatacatgcgctcttgtggtcgcggaatagcgagagtcaacgtcggcttcggcgggctcccttgtggttgtggttgtgccggagcaggtgggctcaaaaccacctttggaacactattctgagcctgaaccttcggggaagcagtgcgagctggcttcggggaaggcaccatcgtagcgttcgcaaacaaagatgcgttcaagccgacaccaacacctggaacccgtctctccgagttggcgttgctgactgccggagtaagagccggagtcgaattccatcgtggatcgttggggtccctttccgctggaatccgagccaacggactcgaaatttgaagaccaggaaacacgctggcccttccattgtttggagactctttcatctttgcgaacccagagtcacccccttccagatctccatatcttctccgccgaatacacctggccaggaagatcagtccaactcccagcagcaccatggcaacgcatcctactacaatcccaacaacctggccggtgctcaaggttggctgaggatttgaagcaacggggggggcggttggtgttgctgaggggtcagcggggatgaacgtctcgttcgggtcgctggccgtagcaattggaggtcgtgttcgagaagcaaaggtcgacgtggtgcttgctgttgttgatgtcgcagtgccggtgactgatcttgtcggcgatggtgtgggtacaatcagacctcctgtcccagtaggccgaatcaaggtagctgtaagagtctcgtgtgtcctcggcgccgccttcgacacgcccacacacatgttataagccgtcgtagtcgtatcgccttcccaaatgtcagcaaaccaacaccgcctatccattcgtaatgaactcactggtagaatccctcccctgacaagaccccaactgactttccccaattatacacgacactgcaccctctcccaccgtataccctgacaaccctgtctgccggcacaaacattgcagcgacggcgagttcccgcatatcctcgagtcgaagttcgccgcaataaacgaccggaaacactcctgagcgcactgcggcacaaagttgaggatctctgacgtgacgttcttggtttgctgctgttgggcgttggcaaaggtaagcagtgtcgtccataacgtgaggcatagtaagaacagcctatatgccattctctgaagcaacatctgtatcccccttcaagtgtcagcttctcccctcgacaaagtttcagaccaggaccatcatggttatgtaaagttacccacctcaaaaggaccttcagtccatctgcatactccgcaacaaacccttttccaaacttcttcttttcgtccgaacaaaggtccccccttcttcaacaatctaggtccgccaagcaaagcttcgtgtagggaggcctatggttgtatagccagcggcgggttacctcggcggctgggcgatgtgcaggtgagttgttgacagggcagaaagcggccgacctggtctggtctcggtgagggtgtgtaaacattaagggttgttgaggacgaaggccagcatctctctcatgtcgtatccacgataacactgtaggagagagatagaaactaagaaaagatgatgatgacgatcatgaacaaaaaaacatgggaaagtcgttctcgtccgaagaaaaaaccagaaaccagaacccctctcacgatacaacctcgaaaaggaaacagagaacaaaaacttgaaacaagaagaatatgagaaaaaagaaagtgatacaggagtgagcgactcggggataaacctgaagaaaagaagagaagggatcaaaagaacaacggtgtcacacaccaccacctcgttgtcatctcatcgatctctcaaccgcggcgggtaggatcactcacacacaccatccccatatcaagcgtggcttgaccctaacctcaaccaggtttggtacacacctacatacctacccatacccttgcttgccgctgagcgcctgttccctccactgcacgcctgcccgcgggctgcgcttaatgataccgcccacccatttagaaaagagacaggacaatgacaaagagatacaagatcccttacccctgccgcggatgtgcataccgggcgggaagaccaagtaccgcacagcgccgcacttcgcctgaccataacctcccataatcaacttatacttgaaagacagccttgttgcgtcatcctcccctcccgaacccgccgttttcccccttttcagcttctaaaatctcagtttgaaacccatctcccgaactcttcgctctccccaaaaagcaaacatcagtccctttccctcccccctccaaccaccccaaacagcaacagcacccaaaagtggctgtccccttgcatcacccatccgccaaccccacagtgcatctctctgcatctcctgcaaagacaacacaccatccactcacatcaaaaaaccaggcagtgccaaataggtgtgtaggcgcttacacccatttttagccgcctggccctcaagaaggggcggaaacccccctcattggccaaaacctcattgaaaccacccgaattggtgtcaatcacgtggatggcatctaccatccaaccattcaaacctcatcattttgtgcacaagcagttgtcttacaccattaagagctacatcttggcaggtacagccaccatgtactcttttttcgttgactcgggtggctgtacctccacctatccgaatgctgctgctcggccatgttcgggtaggtatttcgggcgagttcatcacctctgaacaatatcgcggggaaaccgtcacatagatacccggatgctattgtcaggcgaagcaactttggcacaggaaacagacaccttctaaaaccacaatttggagacgaacaaggcagatggggtaactcgggacgatcaaaagtacactacgtcagaaacctctccttgccgctgggacctgcgcaagcgcctttggtcgatcaactactcaagtacattcactccccatatgcacgccgacaatctgtgatacacggatgctgtagggacccgagggaaatcataaaatcccaggacccggcggcgccaaacatcaggagtcaaaagtaatcgtgaaaagttccggcttcttattcgcctttggtatctaacaaatctctctgcgtgctcaactacatgcccattgcccacgaaaagctcaatttctcaaaaactcccacccgcaaagtgcaaattttcatccatagtcatgcaaattcctgcccatatccacaattagtcctccatcatcatggacaacctatcccaccgagcactgccccgcccacaggagaactaattcccaagggcattaggagcgtagtcggggcgggcacggctcgacttgatcacgtcctgcaccttcttctcagtcaagtcccagtcgtcagggctgagctgaacaaggtcgattccgtagtgattggcaatgtctgaaagggcctcgtagcttcgtctgtcgtagacgaaactaatagagacgccaacacgaccaaaacgaccagtacggccgatacggtgaagataggtctcgtagtctggcacgccagcgccggggcccttcatcggaatgtcgtagttgatgaccatggacacgctggacacatcaatgccacgagccaagacgttggtggtgatgagaaccttggaacgaccggagcggaagtcgtcgaggagagcatcacggttctggccctcgaaggcaccgtgaagggcagacaccttgtggccatcagcctccatgcggcgctgaatctcgttggcactctcacgagtctatatttgttggtcagaaagaggatgatacacattttcttgccagcgactacttacgcggacgaagatgacggacgagccaatggtcatgagaccatagagcttgcaaagcacatcatatttcttgccctcgtctgggcaatccatgtacatttgagaaatacccttgactgtcagctccgtgtgtcggagcttgatctcgttcgccttgggcgcaaactgctgcgcgaaccggtggacattgtctgggaaggtggcggaaaaaagaagaatttggatggtcttggggagtagactatttcctgtcagtgagctgcccattgcatccggggatggaagattcttacgtcttgacacgcacacactgctcaccgagaccctgctggtccaacatgttgtccgcctcgtcaataacgagtagcttcagctgagacacatcgaactggcgacgtctgatcaggtccatgacggtgcctggagttcctaccacgatgctggccctgacaccagtctcacgcgagacttcgccggggatggcggcctgcacgatcaagttctcacaaaattgaccgattgtttggacgacgccctgaatttgccgagcaagctctctgctcggagccagaaggagagcttgaggctgttgcggcttggcgaggtccacgcgcgccaggcaagtgagaacgaaagcagcagtcttgccggtgccggactgggactgagcaatcatgtttgtaggagggtcgctgatcatgagagggagggctctctcttggatcttggatggcttcttgaagttcatagctaaaaggccatcgttgatcgccttggggaggccaagctgctcgaaagactggacggagaagagcgggctttcggcatcattttgaaggtcggcgagtttgacctcgacgtcgtaggcgttctcgacgatgccaacgctattggcaccctcggtcgggtcatcaacttggggggcagcgccctcctccggcttggagatgcggctcgcgaggtccgccatggcttcgacttgggtgaaaattggttgaggggtagagagactgtggaaattctcagttaatatacgcgtaaaacagcgacctaaggttgccagtagaagggcaggtgcaggtgcctgggcggaactttgttgtggaggaagacgaaaccaactggcggttgtggaaactggccctgaccgcgagtcgcagatcacgtccttgccgtcaaggttgtgttcgcgactggtcggtcgtagagatgcaggagcacttactgtgaggggaacgggctcgaggtcgtcagatcaggtagttgaaattgaactggatcaatgatgttgacggaaacctgaggttctagttgttgtcggatggaaagctggcagagaatatcacaaaggaagaagaagcccagcttggtaggtatacactttccggaagccaaagcaagagcgatgtgatggtggggctgtacctgcaattgaagctgcttggtttggcggggtaactgacactggcgctggtgcctgacaagttaggctttacaccaccgtttgacatgctttcaatcagggtccagcgttagcagctgcctgcaaacacacgcagaggctctaacagcaagcatggttgcttccttaaagacaatggaaactcttttaaacatggcattgttgcacttatgtacatgagaccgccttattatccaggattcggtctctcccgaatgtctagccagggcccagactagggttatggactgctttgaagctacgtaagcagctctctgacggatatgtcttcgatagatattacagcatgcaactgaagaagcaagacgctattcccaacttccgaatggatgtccatgtccatggttcgcgagctggtcttggtcgtcccactgcgcttggcatagggggctgcgcagggcgcactgatgctgcaagctgcatggttcgctggggtacatttattttagccaccttacctcactgtggaggggtcaccatcaactccgcgtgttacttcgccaggccagttaccagaatccctcatccaccaccgcacacgagtactattttgacagacgatgcgcggataccacggacctacctccataaaatccaaaaactatcttttgcataccctctctttgctgcctatcgtgcatggtttagattcgaaaacagctttgtagcggtctaggaagcgcaagtgacacgccggaacggaatcaggaatcatggccgaagtagacgttgcgccgacctttggatcggagctcaaggttcgaatcctagatatatcgtcaatggaggactggccagtattgtattggtatgcgtcaggctaaccacggacgctgtaggatggcttcaaaccggcgaatgcctgggttgctaatggcatcgcctggctcgacgatatccagtccttctaccgtgaacgaagtgccatagagaaggagtacagtgccaagctcaatgcgctggccaaaaagtactttgaaaagaaggcgaagaagtcaaccagtctgagcgtcggcgatactcctaccatgacccctggctcgctcgagaggtgcgtgctggaccaccccttacttccggcttccctcccatactgacgaatcgtttcagcgcatccctcaccacatggacgacccatcttacgacgctagaatctcgagccgaagaacacgatcggtacggaaacgaacttgtgaccaaagtagccgatcccctcaaggtcatctcgggacgattcgaagagctacgcaagcgccatgtcgagtacgccgagaggctggagaaggagagagaatcatcgtatgccgacctgcggaagcaaaagaccaaatatgatgctgcttgccaggaggtggagagcaagcggaagaagaccgagtcctccttcgacaaggccaaggcacagagctcttttcagcagcaaatacacgagatgaacaacgtcaagaatacctacctcattgcgatcaacgtcaccaacaagcaaaaagagaaatactaccacgagtacctgcccgaagtcatggacagcctccaggatctttccgaattccgaaccatcaagctcaactctctgtggaccgtggctgcaaatctcgagaccaacatgctccaacagagcttggggcaggttcagcacttgacccaggagatcacgcgcaaccagcctcacctcgactcgatgatgtacattaggcataacatgggcgccttccacgagccggcggacaaggtgtttgagccgagtccagtatggcacgacgatgaatcaatggccatcgacgacccggccaaggtttatctacgaaacgtgctcaacaagtccaagagccagctgggagaactgcgccgcgacgtcgacaagaagaggcgtgaagtagaaggattgaagcggacaaagcagaacgttagggatggaagggagcagaaagacgaggtcacagttattgcgcagctttttatgatccaggaagatctacaccaggccgaccgaaagcgtcttacagccgaggttgagacatcaaccatcacctctgtcgtgggtgatgttactctcggcgctagaaaccacaacttcaagtcgcaaacattcaaaatccccaccaattgcgacctttgcggggagaggatatggggtttgtccgccaagggattcgactgccgagactgcgggtacacttgccatagcaaatgcgagatgaaggtcccagccgagtgcccaggtgaactcaacaaggaggagcgcaagaagatcaagcaggaacgacaggaggctgctaacgctctgttgaagcctagcaatgggccaccggatcatgtggcggaactccctgctctcggcaggtcagagacgatcagctcggtcaattcgggatacgctgccagtgcgcagcggtcgatgacctctccatcggaggagacacctcccgagattcccagcgctacgagaccaggcattacgccggcagcttcgacgacgactgttaggaagaaccgagtcgttgcgcctccaccggcggcgtatattagcgagttgccgggtagcacgcccagctccaatgggtcagcggagaagaaggggaagatgctgtacacgtttgaggcagggggtgatggggagttgtcgattcaggaaggacgggagctggttatattggagccagatagtatgttgcctgccttgtcctgttattgctctgcttactaacagcattcacagccggctctggatggatcaaagtacgagcaggttacaaagaaggtctcgtgccagcaagttatgttgaaatgttggcggcaccaccaccgtcccttgcgccgcagcacacgggtcagtcggcgagaccaccatctacctactctaacagtggttcgtcgatcggtggcacgatcaagaagaagggccctgctgtggcgccgaggagaggggcgaagaagctcaagtatgccgaggcgttgtatgattacacggcgcagagcgatgcggagcatagcatgacggagggggagaggtttgtgcttatcaaggaggacccaggggatgggtgggcggaggtggagaaggggggtgtgacgaagagcgtgccggcgagttatatccaggctgtttagtggatggtcgggggggtgattgagtatagtgggaatgagtggtgatgggcaggataccgcgggggggtggtagtgggcttctttctcccaagatgggggttgtacatagattctgtcgtatatccacatgcctggtggtagatggcgatgaattggtggggacggttgtgtcagagggtagcatgtttatagtgtctgggacctggatcggctctaaacagctgggattatattgacttttatgctgtttcaccacgacaaccacttgatgtgaagcaagggtggcacggtgaacggctgtcccctgaagggcgcaagatcttggcaatgacgtccttcccgcctttggtgcgtgcatgaccccacggcgccactgccagttcccgctgacacccctgacgggcccaaagctttgactttgacgacttccatcaacagttcggatgatctttccacctagatatatatctaggtatggaatgtggaaacagctgatcttttcggcccctcttgatggacaacatcggccgagatttcacgagccctcttaccttacttcctgccctacctatgtttgtaagacagcagcagcagcagcagcagcaacaggagttatgagctgaaaagacggatggggtgtgtgtgtgtgtatgtgtgtgtgtgtgtatgtgtgtgtgtgtggctgcacatggaagcgatcttgatcatggcgcacatggaaggtcactgcgtaacggttgctcattatgactgaggtgactgattgggctttccgttggcaggtggggagatgttggggaggtggtgactgtttggcaggtaggttggtgtccgttgcctgtgtcgtttggttgcaaggtcaactggagtgagtgcaactgcttccggccttttcaccttcacatttctccttcccggtcgaggacagcaccatactccttccttcttttattcttgaaccagcaggccagtgcttcttcaataaccccagagtctgtctgctttcttgctttcttgctttctctctctctctctctctctctctctctctttctctttccaaaacattcgctttcaccctcctcgactctctgaaaaaaaaacaagatattctctcgttcaacaacgctacttttgataccgcccttctcgattttggaactctttttctattttcttgactctttgattaccaccacccatctttaatatcgaaacgttggtctccttgtagcaacccgcattgagacattcttcacacttgtcaatcttccccggattttcttgctgcaagccaagatgagatctctcgcattggtgccggtcttggcaacgatgctcccaagtcttgggacagccaccccgtcgccgacagttgctcaacctcccaccaagaggggtagcctgccggctgtgtctgtttccgggaatggtttgtccttaccactcctttttcaaaatggggaccttggctgatgttgatcataaaacagccttttggcaaaacgacaagcggttttacattcgcggagtggactaccaaccgggcggttcctcggcgatggcggaccccctggcggacacgacgatttgcagccgcgacattgaccaattcagaaagctgggcatcaacacgattcgggtctacattattgacaattctgctaggcacgacgagtgcatgggcaagctggcggatgcggggatatacgttattgtcgatgccaacaatccgctgtacagcatcaaccggtacgacccggcgccgtcgtataacgcaaagtatctgcagagcgtgtttgcgacgattgacgagtttgccaagtatgagaatacactggcgtttttttcggggaatgaggtggtgaatgatgtggtgaattcgacgctggcggcgaggtatgtgaaggcggtgacgagggacatgaggaggtatattggggagagggggtaccggagggtgccggtggggtattcggcggcggatgtggggagtaataggaggcagcaggcggattggatgaattgtgggagtgaggatgagaggtcggatttttttgcgtttgtaagttgtctgagcgggtgttgtgggaaaggggtggtttggtcgctgacgtgaacaacagaatgattactcgtggtgcaattcggactttcggacggcggggtgggaccagaaggtgaagaacttttcggattatggtttgcctattttgtgagttggttttcggattggtggtggtggtgtgggatgatgctgacgatgtgtagcctctcggagtatggctgccttaccaatggccgggactttggcgaggttgctgctctgatgagtgacaagatgacgagtgtgtactctggaggtctgatgtacgaatacgccatgggggataatggctacggcattgcaaagattcctagcgtcaagggctcctcagttcagaaactggatgggtttgagaagtttgcctctgctctggctgccaacccaccccccgaaggagatggaggatttgtctcgacgacacacgccaatgcctgccctaccaaggatgccaactggctcattgacacgactttgctgccagctatccctgagcaggccaagatgttgatgatggagggggctggatctggacccggtctcggtggtgacgggtctcagaatgctgtggatgctggcactagcagtggcgacgcggagcaaggttctgggacggtgacttcgtccagcacgcccaaggggagtgaaaatgcggcgccggcgacatcaaccccggccaacgctagagccgtggtcaagatcccgttggttctgacgggaatggtggttgtgttgacattgggtggttcttttttgctctgatgacaaggagactagggttgatgtgcatgtatctggcatgcttgtttgtgtatcgattgatttttgactgagacattgctaggttatggtggtgggaaaggcatcttgacgtttcttttgaactagaaaaaggttttgggacattatggtagtttttaatcaacttttctttttgttattatgtgcttcatcaaggccagtcgctgctctttgctaaaaagtccgccagcttttcgaggtactccttgtctatttggtcgaagccgttttcgactgtgcagtcaatgtcgattatccctaccacgcccttgccctcgaccatgatggggacgacgatttcgcttttgctggacgagtcgcaggcgatgtgacctgggaactgctcgacgtcggggacgagctgagttgtctgggtggcggctgctgtgccgcagactccgcggccgaagttgatggtttggcaggcgactttgccttgaaacggacccaagatgaggcgtggttttgtgggaggggaggtgtggtcgtggacgtagaagccggcccagtttaccgaggaggagggggaggggagggagcggtagaggtgccagaggagggaggaggtgttggagaggttgctgccctttgtcagctcgatttttcagtacgaagtctgtggtgatatttcatggtgatatttcatggtggtatttcgtggtggtatttcatggtgctgatgatgtttggggttttgaatgtggatgagatacgggggcgggggtaaagaggggggtggggtccacnnnnnnnnnnnnnnnnnnnnnnnnnnnnnnnnnnnnnnnnnnnnnnnnnnnnnnnnnnnnnnnnnnnnnnnnnnnnnnnnnnnnnnnnnnnnnnnnnnnnnnnnnnnnnnnnnnnnnnnnnnnnnnnnnnnnnnnnnnnnnnnnnnnnnncacccttgtttgccagtctcagttggcctcgggagcttgtggggaaagggggaaagggggaaaggggtgtgatagggggtggcagttggggtggtgaaagggtgagatggggtgaagatggtgaaatagggacggggcacaaggggagaccttaccacacccagtttctttgctcgtaacaaagaccttctacctcgtcgaggagctgttggtaggcttctggtttggtgaggttgggggagaagtttgttgcgtcggcgtggaccttttcttccttgttagcaactgtttttttggtttgtatgacatgaggctcaccatttggacggttatgggttcagatggtctgagattagattgttgttggtggtgatggtggtgagcgataagatacagctgactctttgtctgctgaacaggtttgaaaatgggattgggtatctctaaaaaaaatgacaaatgggtatcaagaatgcgtggaattggtgtggatgaagttgaattgtcttagagataaaaacacaccgaaccacctctctctttatacacaactttcatacttgctcacctggcttacacacacctcaactgtggagcccgaaccgatggcgcaattctcgcgatgcgcgatcgcacaaggaattgctgcttcatcaggaagctcgcaacagaccagcaagaatgcggggcgggccggagataaaaataggggataaacccggccgggctacccctgattttgaactcatacaacaagcaggaaatccaaatgccgtaatcgatatccatatgtacgcaaaatcccatatgtactgcggcatataaaaagatgacactataattctattttaacaacactacaacaatactaaccctactatttgacacatcaagtaggtgtctgcctctaaaacagcgaatggatgaacgacgcttgctcttcttacacttgtatgtatgccttcttcttttttcactgccatcgttgagaaatcagccctcattaacttgtcgagtggtaaataaaatcaggcggttactgccggcccgtttgtcgtccccaggtggggaaccttgactgtcacttcgccatcaccctccccgtccacatcaagcccgctgccgctgtcatcgttcgggctctcctccgcgacctgcccttggatcctgcgcttggcgtcctgcttgtccgcctcggtgatttgagcgtcgtccttgcgcatgtcaggggtccattgcggttcagagggggcgtggccgaccgacatgccgacgcggatctggtcttgttagcagttgttgtgaaacaaagatggtgggtaaaactcaccaaggtctccagcgcagtattcgaattgtccaccaagtcatcatcaaacaccatctttccactctcaaacagcaccaccagcgtcgacccgccaaacttgaagtagcccagctcatcacccctcttaacctcgtccccttccttctttgtaatcacggtgctgcccaccatcatggcaccaatgcaaatcaccattacccgtccgaattctggggaatcaataggcacgacaatcctcacattctcgccgtacacatctagcgccgaccgaatagccattgggttgacagtgtagtattcacctgcaatggtcttgggttccctcataacaccatccacggggatgtggaatctgtggtagtcttgaggcgccagtctgaaaatacccagcgcgccaccggcttcgtagcggtgggcatcttcagggcaggcatcgcctaggagacgcttgacgctgaattctctacccttgatccagaccttggtggcaatatcaacgcggttaaagaccacggatctgcaatcggccggagagaccacaatgcgcgggttgtttggtgcagaaactggtctggcatcaggcttgagagcgcggtagaaaaactcgttgaagttcttgaactggtccagaggaagcaacacctcagacaagtccaatccgtggaaggcgatgaatttggggatttcggccttggaagcagggtcgtcatatttcttgccctgcttaatactgagagacttgagcagcttgcgaatgcgcttcttctccatattgttggacttgagacccttgtacaacaagcgaataccaagacggacgtagacgctcatcttctcttcgttgatctgaccggtgatgcggtcttgcacgaggatgttggcagagttggcaccgagcttgtaaccaccgtaggagatcttggtgatcaccttggagtaccacttgcgctgggcctggctggacgtaacgaacccacccatcatcaggttgttcacctgtcgccagtcctggctggcacaggtggcaatatgggtgatgatgtctgcatccttgcgcttgttcaagcgcggttgatggcagatggggcattcgcggatctctaccacatgttcttcggtgttgctagcattgagatcgtcccggtcgaggtaatcgccctcttcgcctggagtcgccagctctggaacagtgatgctgtcggttccgccaaggtcagactcgctcggtggctggacagtatcgggatgcgactccttgccgggtataggcagcaggttcttgaccttttcggcggcatctgggagaatattcttcacacgctccgcgacacctggagttctgaccttggactcaagctggtcctccaggcagatgacggcctcatccatggttaggtcctcgacgtcttcattatcacccgccttatgggggaatcggaggaagaagctgtcaatcgtcgactcgcgcagggtcgatcccaaagagtccaacatggtggtcaactcgaccttgctaataagtccgctctcgtcggcgtcgtactgcttcaacagagctctccagaactgttgcctgagtgcggcgtaaggcatgtacttggcacggatgtacagctgtggattatgcttgtcctcccacttctcaaggttcttcatcctgaggggaagtgtgtaagggaagaaatccggatcttcagtttccggtgaggcattctcagccgtgttcgcggcggccgcagcgacaccgccttcccccggctgaacgagtccggcggggatcggagcattgatagcgggtgtttgagcgccctcaggcacctcatgaagctgttgaccagagcccaatgccggcgttgcgacaagagaagatacattggtcaaggttgacggattcttggacaatgcaggcctagcttgcttggacaagctctgggtagagttggtccgggaaagacccagtctcataaaacgggtcctctgcgccggagccgaaaactcagctacctccttcaagttgtacagtccagtggcggggtccgcctttggtgccttggagatgatttcctgtaccggaaagttcacggaggcaatgaaatcgtttccagagtacttgtcgtggtcaatgacagtaaaagcaaactggtactgctgttcgtggttcaacacctggaagatcatcttctcgttgaacacgggatccaggttgtgacggatcgtcttggtccggtatgtcttcttgccaagcgaggcaaccacaaaaggatccatgtcaaagctcgtccttgtaacgttcgactccgggggaaggtcggtaatcttgcaaatctccaggaaaataataccaaccacgtcactaccgccgttgataaattcgtaggggttttgcctctttttgcgcttcagccccttgatccgcagtctcctccttctcttctcggcagtttccggcttggtagggtcctcatcttcgggggtctcgtcctcgtagtcgtagtcgtcgtcctcatcggcgtcgtcggttactcttccccccaacgaaggcgccggcgatggcaccttgcccttggtcggagcaagcacgggggtacgagatggagtaggggtcaacgaggcgtcgattgccggagcagatttagcaattgcagcgaacttctcgtagatctgctgggggctggcgtccttgttggaggtgtcgagcagagagaactgcagcaagacctcgcccgaaacaacgcccgtcttcttccctggacgcttgctcttcagcttgtaccatgttggcggctgctcgatcttttcatcggcgaagatctcctccagggcaaggtcaaactcgcccaagtagtccttcccaaagcgatccttatcccagcagttcacatcgaggagcaggctctgaatgccattgatggggagctggcatgtttcgttccattctgggttcagttcttcgactcggtatgtgtaatgtgcttcgattcgccaagattgagtacgagatactgggcgggagttgcagcaatcagccaccagtcacttcctcacgggggtagaagggggagcacaatgtgggatatctgcagctcctgtgaaatggataccgcactcgatgtactcaccggatccgacgttcctcccctgtccttggcagcgagatctttggcctggattttcagcaagtcagtatgcgatgctactccttggcaccacgagggcagcgatggtggtgatggtggtgatggtgatggtgatggtgtgtggccctcatacccgtagaatcgatacctgcaccagcaggcccgtctccctgcggccctctgggctggcggaatctcctttgctgcgcatagggctggcactacggctgttcgaagctgagttggcggcagagttggagtagcccggcttcagacggttggggatgaagcgagccattatgctaagaggtgggtgggctggcgcggggtatgcgtgtcttttatctaccttggcacgatcgtgtagtaggtaatcgttccaagatttattttgttcttgcaattgaccctccaatccaatcgaaggagggcccaatcaattacgacgtaggttccaagagtgccactctccaatgctgtgctgtgctgtgctgtgctgtgctgtgctgtgctgtgctgtgctgttctgttgctgtgtttggtgggtggtgggtggtgggtggtatgtaatgtttaaagcgtagggcagactcgcagagagcaaggcagatcaaaacaggatggctggctagctggctgtccttccccagctttccccttctctctctcttcttagtttcgaatcagtggcgatgatagggtgggacatgtgcgggtagtggtccgtcgtcgcaactttggttgttgtttgatggatccctcgatgttcccagtagctgtagtgcccgcacagtcgacgtcagggacccgatgacctgggcgggagcagatcaaagaggtacggatagaaagcttggagaagaatggagctgggaaaacgacgaggacgtcatccacctagcaacagggagacacggggcttgggggcccagctaggtatttgtgaatttgggcggtggagctgtgatggcggggcgctggtgtgctggacgcgtcccggaggattggcgatgccgagacctgcccaaaagaactttggacccgttcagctgctgggtctagggggcggcgctaggcgaaattggggagtatcttcagcggctaccaagctgtttttggcggtgcccgcagttgacgttatgtgtgtcttggtcgacgagatatggctggatggatggtttttggtttgggctcaacaaaatgaaggaaaaaacaggtcaaggcatcggggacgggctcgtgtatactcatgtgtcgtccgcagcgaatgctgttgggcgtacagccgtcaatcagcatctgtccattctcatcaggcaggtgggccgtcattccaacacaccctgattgaggcacctttcgtttgagatgaatgctgcttttggagctttggaggactggcagattggaccacgcgtcgccctcgggttgctccccccttttaaacgagcgggaccggatattgcaaagcctgatgctgcgaccaacacagtacatttttctcaatcaaacactctgaccacatcccgcatgctgcccgcatgaacgtgcctgaaagtgacggcttcaaacctacaccacgcctcctgcaactttgcatcagcctggccccagctgtggccgactggggtttgcgcaacctgatcgatcgacctcacaaagagtttccgagggctcgggaaaaggcagtgatggtctcgacctcccggcaatctgggtctcctgctctgtcaggagatgcctacgggattgggtagctgttggaaacaaagacaccgtcgcagcggtgaccttcccgttcgtcccaagtgagccctggggctggacacagaaaccgctcaccatgcccattgcgtataccgtagtaaaagcctcgtggggtatttttgggtgccagcctgccagcatgccagccctcgggggctttgaaaccacactctcaccagtggcgcaataatatctgatttgtgaagtcttttctacgcccccttttcagcgagatatgcactcacacaccctccaccaacaagataataatccgagctatccgcactcaagatgacatttccatccaatagcagcaactattccatagtccagtcaaatgccatgctgacctaattcccattacctaacttctgtaacacacaagttaacctacagacacaaaatgatatcataccagcccaggcggaacaaccgctccatccatctgctgctccccattgttaacaacaccggcccgattcccagcaacatttccgtcacaaaccagctcactaaaagcctcaggccacaaaaacaccctctcctccatgggtgtcatgacgacataccgcggcacagcattccgactcgacaccttcctccacatatccgccctcgggttaaacctcgccggccttcccctgccgcccgtcttcctctcatcctcctccagaatctcctccagcatcatttgaatatcagcaaagctcccaaacggcaaatacttgataccatgctcaacacaatacccctccaacctcaaccccttcctcgcaaacaacacatccgcctccctcattgcaggcgaatcagagaccccatccccaataaacacaatcaacggcacctcctcctcctccacctcctcctcaacctccctcctcgcctccatcatactcaaccccttatcatgacccagctgactccccccatgcctccaaaccggcctccactccgacccatcatgtgtaatctccgcctcgttagcaacaatatcaatcatggccgattgctcccccccaaaaaactcatccagcacccttcttcaaaccggcttcagcccagcactgatgacatggaatgggatcccctccctcagataaaactggtgaaatccggcaaacccagggtcaattcctagctgttgggacatgagctcgaacccgtcatcaaaagggacgttcaagctcccccacatttcttcgacacgtccttgagggtgcgttgccccgaggcgatctgggcgtcgagaagctcccgcttggaggggccgcacccgtacgtgttgaagaggatgtggcctgtgtcttggagggagattgtgccgtcgaagtctgctggagagttagtgttgggtttggtaaatgggggaggggaggaacaggccggagaagcagacaatcttgcgctttttgttcgtggccgggactgcgtcacctgccttggaggctggggctggaggaggggagacagcggagggcatcttgttggtggtaaatcgagaaaattattgacagtgagtttgaaggtaggtgggccaaaagtgagaacagccatgaagaggagcaaacattggaagtatccggatatgccccctcacaaaccaaccaccagcttgactggccacccggaaccccggagatctcatctctggcgcttccaatcgctggatagcagctaacctggcagccgcgcgcgggtttgagatgggcctaagttaggaaaatgccacgggccgagagctacagcgcgggtttcccccgtaacgctttccattgccgacattcttggggcagctgactcgcggtatggacaaacacccgtggaagaaacggcctcgctgcaaatgcaggtacaaactcgcgcgttttgcctctagtcctactgcaggaaccaagcagcatattctgggctggacgaaagtagacaaatttggtaaattatcttcgttcctctatatatcagctttttagagtcctgtgtccctgtaataatcaaagtaaaccatggagtttcaaggagggctgtgggatatcatcaaatatttcataaactcgctcgtttcaaaaaagcaccaatctacgcagagaccttggcactgtactttgacgccgccttgtcaaacaaatcactcttttccgccaggtccaccaggagagggtgttgagcgtctgtggcttcgagaagactaaacacaaagtcagcattgatactggtttggaagttgggctccgggacacatacgtcttctgctccgcaccatccttgccggcaatgacgttcagcaccagaaggttggcgatggcctcggcgaactttggctcctttttcaaggcctggtcgagagcagcttgggcctcttctgttctgccaaggtgaagctcggcaacggcctgggagacgagggaccggactgatgatgtagcgggtgcttgcgcgagctcctcaaagacgtagaaggcttgttggtacttctcaccgccctgcagcaaacatatcagtgtgtgacccttagaaggaaaatcctggggtagcacgaaccagcctcaacccaacccaagactctgccaagttcaccaacaaactgtcctgcgcccaccgccgcgcggcggtaacctccttgacggcaaggtcatttctgttttgttgcagatggatctgcacaataagcgcaacggcgtccactgttcaaccaccacctcgtcagttgtgtcccttcagtcgtttgcctgccgtagactagatatagaatgtaacccacagcttccctggtgttgcgaaagaagcgccaaagcctcctcactcttgcccgcagcctgcaatactgtcccgcccacaacctgtactgtagtgttgtcggccgctgactctgcgagcttctcgatgatgccaaccgccttgtcgccgttcccaagcgcttgctcggccagggcagcgatggcctgcaactctggctccttctcgcccgttacgtcggcgagggcatcctcggcctggcctagagcgatgcgagctcgcagctggaggacacgggcggggagctcgttctcggaggacagggtggaaacatcgtagtcgaccacttcttggtattgtccttggtgaaagtggttgtggatgttgatgagttcgccttcggccgagtagggatccattttgggctttgctgtgtggttttgggctgggagaaggtgaagtgagtggtgaagctgttgtcagtggcctctttcccctgtagtttaattgacccgacgtggagctttcctgggcgcggtgggatgcgctgcggaacaaaccgttgccaagtagggggttgctccagggttagggtctggatggcccacctatggttcccagcgctgaaagcttccactgagagcttcactttggcactggagcttggggcagctcaagaaacaggcgatctaacgacatcgacaccgagaaactaagcgatgttcatcagggagagatctaaacacagtttgatatcatcgtcgacgaccgattatacaacatcttgaaatgtcataaagcatttgaacaattccggccgagcatggaacctggattgactttggcaagcagtttaccaacatcacagcatcgttgggccatttctgggtcggagatcaaacaaacatcatgcgccaactcccacgacaatatcattccttcttattattacaactttgaatgaagctttccaacctcggcatctgatcactcacaccttcacactgaataccagcatcaacgagcaccgccatcgcctcctactcgacattgagctttggaagctctggtgtgaaggagcttacatcgggtcatcctcaccatcactgccgtcctttcggatagttctttggctcaaatggcggcgagtggtctctcagccacaccgtgaactccgacggcgccggttagaaggaatcattcgatgcctggatcgcaacggttcaagcaggcggtcatcttagctaagtataatcctcttcattatcgcggaatttactccaccgttcgtcacaaagcctgggttgcacgacttggaaagttgaaacagttagactgtcatcatcatccctgccgtctctcatttcgttgcttgccaaccagtgctctctcactccatctcccccacaccgcatgaatctggcccaacccatccagttggccaggtcttcgaatggccaacccaagattcccttttgtccgctttcctatcctggcgagatgcctcgacgaaaagagcttcttcaggttcgatcgccatgccgtgcacacggcatggatgattcaagtagctttcttcaacctcacaagcccgatcaaaggttcagtaaaacttcttctccagatgccgtaccatttctctcaattgttggttgttcgttgaacgctagcgaggggtcgaaacatgaaactgttgctttctcaaggcttcaaaactcgcgatgaacctcgacatgggactcccatgcttggaagaggagtccttcggatatcacaaccggacccctgtcaggcaaggtgcggcaacaccttgctctcttcatttgctttcgtcagaaattctccgtccgatgttctttttcaggactgcaaccttccttctcacgtctttggatgctggtgctcggacgtgctatacttgtcacccgctcttgcagcgaagggacgtattgaagtcggcggttggaaacacttgcttccgctgcagagacgggagcgatcctatttttgttggacctatctaggaagttatcaacaagtgttgatgatgagtctatgtacaagacaaacaagttttgagcaacatatgccgaatacaattcccataccgggccaagagacataaacaagtctggatacacaaaccccttctcacaaaaaaactggtgttcatgtttgatactttatccgtcgtttctaagtaaccctccctgattggtggatatggaatcgaatcgtagtgtggtggttacatagcgtgccttaatatagcaccccggtcatgtcccgtcttgccgcaaatggtccccagtgccgacagggggccttcttctgccaaggggttctcgaggagttcttgggattcgggtctcagagttcggccatggcggggatcccgccccttcaccaccagccgccctatgacagtggtatcgttcggcgatggcttgggcgcaccacgatggaagcatacaaagggtggtcatgcccccctgctgctcatcctcgcctccgccacagccgtttgttgctcaaggattcttaccttgtcgctctctctctttctctcttcacaaacccaggcacaggttgtccagtgtcatgaatatctcttgggtactctccaactgttgatggatcctttctaatcaaactttctcttctccgctgccggcttgtgttctttcttggtttcttatgtgttgtgcttttccttctttttcttctcagggtcagcatcttatattgcgggacatggagataaccatacctccacgagaccatggaccttcgacttttcgatatgcgtgggatgagaacggtgaggtgacacagatgacaaggtaagcttgacttttctgttcgcagtccagtcttcggacgaaacctgtctaacacacacatgtctccagagtacgagaggaccagccatccccactagtcacaccacgacctatcccaggtcgacaaactattcaatggccctttcagagcatcgttaccgagacggaaatcgcctccccgacaacgacgacacacttccaccatcaccaccattatcatcacagacgggcgacgacagctacgacttggcgaccatggctacaaaggaggagagatagcgacgggcactcgatagcgaggaatttggtgccagattacgtcgtcaactacctccgaggtgagacaccagaaactgtgtcgaagcggaagtatatccactatggggtgggcaaagaggggaaacgcccactgccggggagttcgcatcggcatctccaatcaagagcggccgagtttggaggattttacgattcggagtcttcagaagagagagggagcggtgactctggtggtgatcaagagcgcctgggtttcggcaacgagaaacggcgaggaggtgatggcagggcgttgaggaatactcttcttgtggggtggagggccggggtggcttttaacacgctggtcgggtttgtgattttgattgtggggttcatctgtctgatactggcgatatcgaaggcttcattgcttggagggggtggtgggagactggcggttttcacggggagttgcgcggcaactacgaggattgactggggattgcatgccgttattaacgtgttttgtgtggtgttattggcgggggcacattatgtgtttcaggtgctgagcagtccgacgagggaagaggtcgatgaggctcatcggaaatggcaatggttggatatcggggtgccaagctttcgaaatttgaggtttattgggagagtgagggtggtgctggcggttgtggttatgggggcggcggttgttactcagataatgtgagctttcccggagacaacagagggagaagaagaggctaacaatccacaggtataatgcggtaatcttcacttcgcaaacagcgcctgacttcaaggctgctgtcgttacggatgccttcactcgaggcgcatcattcagcaacgctacggaaaacaacaatggcggactgagccgactcgaaattctcagtcttcagcggcaagcaagcagcgacggcatggccaatttgacgagatccgactgcttcattcaactcgaccgcacccttgagtccgacctatcagccattctgcttgtttccaacatcaactcgccttcttcgcttctccaaaccgctgcaggaccccggacctcgcctttcagctcgatcgtgtccgaccagtccacaattcgttactgtctctccgctcctcttattcagccaaagacgtgcgaagtcaacctcaatgcctcactgctgggcgttgtcgccctcctcaactcctttgcgctggtagcaggcgcctccattctcttcaagcaccactcccgcttctcgcctctatgcaccctcggtgatgccatcaactcctttctcagggagcccgacactgccacccagcagtccggctcactcctgtccaagaaacaggacgtcttgaccggccgctggggagcgggcattaacgagccagccaaatattacattcccacccaccattactggatcaaatccgtttctttcaccaacctcaccacctttgtagtggtttggacggttatcgcctccttggtaattgttgccctggcaacatccgtctgccacgatccagagcacctccttacatcgtttccgtcaactctgctcggagcgaaatcgctggtcatgtttccggggggtatcccacctgcgggcgcggctatcattactgccctcccacaacttgggctggtacttctttatctcacgacgaacagcattcttacgagttatcacttatcccacgagtgctcactcttcgcggtctcaccccgcccacttagactttcttcgccttttccccagggccttcagactagcagtttatttctcacgctgccgcgcccgctctcgtggctgcttatttttggttttgtcgcgctgggctttcttctctctcaatcattcgttttggtgtcggtcactactggtgacatgaccgccaacgctgtcggcctgagcggtgtcgggctgttggctctgctctcgctgttgctcattctattgttgctagtcttggggttagggttgcgaaaggcccctcctgctggtcttcaggggtgggagctgaaagggaaccctatggtgctggaaggggggagttgctcggctgttgttgctgctaggtgtcattatcatcagttttttgtgccgggggggaatgggacgagggatgggactacgattagtgggggggagaggaggagggagcagagtatttggaagcaggagttgatttggggggttattaagccgggggttgggatggaggttgggctttgtgggttcgggaggggggaggctcaggatggggtggggaggttaggggtggggaggtgttatgcttgatcttttgactttttggcggagggtttatttgctttgttttggggatggagtttaaagcggccggttgctgctggttttggattgggattatctggcctagagctgggtaatgggattgggtatgaagacaagagctggaacttggacttgcagaaatggaggaatgaaaatggacagataccccggaggatttctgcttatgaacagaattttgactagttgaacatagatagcaaatgagaatgagaactcccagagttacatatcatctctttgtttcactacttttgcatctccgtatgttgagatgctgtgagtgttatgttattttctagtacatgcagcagccctccgctacagacggcttattcagaatcgaaccaatcccctttcaagctctgctttgtcagtccacgattcggaaaactgtcgacagccaacagtagtccgagcctattaccgttggacggctgcacgttttcggcagcaaaccccacccagtgacgcaactctcctccagaagccgaaagcaagcgatcctggtgagagagaatgccctgccccagcacagcctcacgtccagtttggacatattccttcaagaagcccaactgtctcatcttaatatcatctcacactctaaacaaacaaagtggggggtcaattgtcttagacgcttacaaccgcacttacatcaactcacatgatagcttgagattacctactgaacaccttcaatttgacataccacttacactgtgaggatcaactcggccggacatcatggactcattcaaattcctcaaacgtcgcacgacggagctcttcaactccctcccctcatcactccccgccatcaaaagccctacctttggcagcggcaacagcaacatcatgaggggcacctgggaaaagcttcagctcccgcctcttccgagatcaggccacacagccgacatcgtcgacggcaccgtctacatcttcggcggcggcaacgacaacgacgtccacaccatcacccttcccgcaagcggagcccaagccgattactacaccatcaaggccaaacccgtcaaatccaccgcccctaaacccaaagaccccaaccccgacgtcccttccatctccattgaagaaacccccaacgacgagccccaaaacctctccgacatttctctcacctcccctcctcccgggtcaaaagacaagggaaaatcccccgcctcacccacctcttccctcccagacatcccccctccccgcaaaggccacgcctctgccgtgatcggtcacaggatcttcctcttcggcggttcatccccctcaaccccctcccaacccctcaacgaatccggccgcgtctggatcttcgacacccgcacccacctctggtccttcctcgacccagccctagccacacccgcccatccctcccctaggttcaaccacgcagcagtatcaaccccgaaaccagacaacttctccccctcttcccatccttccggccataccacatggaaagaatgggccttaggaaccgacaccaccaacctccacgagcagggaatcccccaagatcccgtggtgggtttcctcgcggaaaaagcgcgtgatcttgactctgaaggttacgggacgtttatcatttccggtggtaccctgccctcaggggaggcgtcagatgaaacctgggcgtttgacgtccactcttctacctggcagcctctcccttcttccctttccccggtgacaggtgggtgtagtctcgcgctggcaaagaacaggttgtataagctcggcggcggggagggtggtggtggcggttctgacaagctcacaatggagtatttatccctctcccttgactccttcaacgatgttgcttccgcgggggaggaggtgttggttacggcgaagggtggctggaaacctattctaccggggaaggaggatgtggggtataaaactccggacttgaccgccgtccctcttgatgacgacgacgacgacaacagtgccagtttttggccagcagcgaggacgaacgcttcgttaagtgtagtgacgattggtggtgtcaatggaagagagtatttgttgcttgcgtttggggaggacgggcaaggtgggaagatggatgatgtttgggcttttttgacgccaaagtcggggcatgaaaaggggcggcatggggtgacggaggggagttttgtcaaggcgcaggatgcggtttgggatggggtgggggggttgcttggtggtgggagggatagacaccaggaggggaggtggtttagggttgagatgggggttgaggatgaggaggatgatgatagtttggatgggcccggggggagggcacaagccgcgatggcgagtattggggacttggacgagagtggggttgtgatttgggggggtgttgttggacaggggaatagggtgaagggggatgggtgggtgatgaggttgaagtgatttttggtgtgcagaccagttgggtacacaggacactggttcggacaagattcggtttttattttactgtcagtgatgattttttttttttttagcaaggcagcttctgttggtggaagaaatagttcctgcagtgtcagttattgaatgattacggggctcaatatcgagccacccccttggcatatttgattttgacttgtcatcattcataagaactgaagttccaaaaaaacaattcgtaatgtgacgatggcgatcacaagcatcgaagcaagcaatgtattcaagccgtcctatatactcttgaccccccctttccaagctgcgaatgcctgtcaacactttttgtacactcaccccctcgtccccctctatcatcatcacatcatataataagccctgttgtagtgtgaaaacatctagttttgtaaccacataaaatcaaaccactcccccctctctaaaaattacaaatccgacctggtagtctccaccccccaaggctcactcgtcaggttcgtcagtcccgcgctattctcacaagtgtccctcccgctcacaggacccggcttgggcgccttgctcgcatcgttcaagctctccttgagcgcggtgaggagctgcttggtggtctcgggagtcaggtcctcgtagtactcgtcattgatctggaccatgggcgcgttgacgcacgcccccaaacactcgacctcgatgaaggtgaagaggccgtcgggggtggtctcgccttgcttgatgccgaggtgttccttgattgccttgacgatggcgtctgagccgcagccgccgagttggcagggggtctgttatgtatagttagaaatggttattgatagtgaagggggggacgtacggtcgtgcaagcctggacgtgaaacttgcccacgggggttcggttgtacatggtgtagaagctggccacctcgtagacgcgcatgggcggcatctcgaggatgcgggcgacctcgttcatgaccgagatggaggtgaagccgtgctgacgctggccgaggtcgaggaggggcatgacggctgcttttttgtactggggggggtagcgcttgaggatctcggtgatgattttctcgttttggtcggtgaacttgaaggggatggaggggttgttgtcgggggtgttgcggtgcttttttttttgaagtttagtctccattcaatatttatagcttgggggaagcggggggggggggagactcaccaccatgagggtgtcgctttgcctcctcgccgacatggagatggcgcgggtctggagtggtgacgaggagggggcagccaccctgctcacggagcggagggctgtccgcatgacgggggccagcttgctcgccattgctgcagtggtggactagaggggtggttgagcaatggacggaggttgtggttggagggggtggccggcggcgacgtcgagggggaggttatcttcaggtttgggttcgtcgtcgtcaatcaattgacgattggcaagctccccagtcttgctgctcaatggcccgggacccaccttgcgttgacaattggtggggtttgattgggtgaaatcggggcttgtgcggtttattcaattacccgattttatagctgcgctcgaccgttttattcagcattggagctcatggagctccagcatcattttccctcgagttatgtgtaaacaccgtctactaattccgaaaccctctttttgctcgtcaaaaatatcctttcagaccaaaaaccacaatcgactggagaacgatgtgaagcttcaaggccaagaagaatttagtcctgaggtatgctgagatgaagctttgagaggctcgctcccacctttggtgcccctttggccgaacaaggcgttcgcgatgacacggccaagtccaggcaagctcatgcccagtctccggctgggttgctgtcagccttttggttctcgaaaacgtggacgacttggtgtaatatccggcacagtatggcatctattcaatgcctcctcagccaagcagtcaccgacattccttgtgtcctcctaacataaccctgaaaggggctgtctattgacaggccaagcaagcgctttcaagtgaacagacggctgagattgattacgtttacagtcttcttgagaccgcccagaccttttccatctactctgttattgcctttctcttttatccagccctatatattctgtcgggctccaattgtgcccccttgtttcgacatgccgccttcaatctatgtcaagccatggcagccatggcaagcatgccatccgatatcaagatgacactagactcgaccagctgcgagtgcgcgccggtgagattccatgtatggttcgggaggctttccgaacgagtcctccttttttgacatcacggaatctctcagctttgattgcgacggggtgacggcctgctgctctcacatgagggagacacccccttcccgggtttgggatgttttatttattacttccatcaatcgcagtcagtcaaaccgtatcgcttaatgcaacgcggtggatgggtttttccgtcgggcggcagccatggcttccgtggtattgcagacgacctttgaatatcagatcgacaacaacatggctgtgccggaccggccgtcagagatatcttattcgccagacggctcaactgggacagtctccgtctcgttcctatttaggacagtggtcatccggccgtactctctcgcagtccaggtgacttgggcgggatactgcctaaagtccggagccaaggggcgggtacggcattgagactggcgagtgccattgcgtggctgccgtccaacccatttaccgcgaaacgcggagcgcaatctatccccagtttatctgaatagattgacctcctgttcaagtccggggccccgcgaaaatatcgactaccgacacggccggccgcctgtgcctcttcccagtccatcgctacccagccatggccttggttggctggaatagggatgccgtcatctacaatttaggtgcacgtcttgacatgtccgggacttaggaattcggtgcctttctcgggcgaacagacgggagtaggaggctcaagaatggcataaatacaaagggggcgaccgctggtaatcgaaaaccgtcctagagtcacatcaaggcaacctacttgacaagtcctggacactcagccctgactacacgccaccatgaagttctccttcattgccctcctggcctgcggcctcacggtcgatgctcacgccatcttccaggtatgtcagcaccagtcaccatcgaggcaggagtcgttttcacgctgacaatcaaggcagaaaatctcagtcaacggacaagataagggtcagctcactggcatccgtgctcccaacaacaacaacccagtacagaatgtgaacgaccagaacatggcctgcggacagcccggctccaagtccaacacggttgtcaacgttaacgctggtgaccgtatcggtgcctactttgggcatgtcatcggcggagcccagttccctaacgaccgagaccatcccatcgctgcctctcacaagggtcccgtccaggcttaccttgccaaggtcgacaatgctgctactgccagctccaacggccagaagtggttcaagatctggcacgaaggctttgatcaaggcagcaggaagtggggtgtcgacactgtcattcagaaccaaggctggacgtatttcaacatcccgcagtgcatcgcgccgggccaatacctcctgcgcgttgagcttttggctctccactcggccaaccagcaaggccaggctcagttctacaagtcttgcgctcagatcaacatttcgggctcgggctccttcactccttctcagaccgtctctttccccggtgcctaccaggccaaccaccccggtatcctcaccagcatctacggtctcacaggccagcccgacaacggcggcaagccgtacagcatcccgggccctgctcccatctcttgctaagcttttgagccgcggcttggcttctccggggaaacaaacatgatcctcggcttgtggggacgggtgaagaggagccccccaagtatccagcaaaagataatggcgactgggtgggtaggtggtttgtgggcagatgtgtgtatctataggttattatgagacggtcgtacattgtgtgagatatccgcatgcataaacagcatcatgcatcatggaggagcaagcagacactacaatgatccacaagccaactgcaaggtccaattcgtttccacagtgaccttttctcgcctcggcgcctttctcgcaaggcgaggaagcgggcctccacaatgacatggaagcttcggatgcatcgccatgctttttccatgcaaaattgtcggaaaagcacgagccaagtggatgaagtcctgggacctgcaggcgggttctcccgtaggaaaatgtatgtacatgacattgctaccactagtcagggacagttcgggttttctcggtatattctgatatttgggatcgacgggcaccgggtgatgtttgctgactcttgtccatttgttgatgtgtttcttctcacggccggcacctgtgaaaagtgaacggttggcgccgcacaacgtgcatgacacctgcaggaagccagccaaacagcttccagcgaggctgatagcatgctacagccaagagatgccatctcacatcggtaaccccccactcaagcaagcatggcagcacagcttcacagcttcattagctgttgggacattcaggacattgggcagagcagagcagccttgccggttcgatgaagtgacaaacgcgaaggcgcgatatcaaggttttttgtttttctgataaaaaggattgcgataagcgattggttgtcgaggttgtgtctcgtcaccgctggacggttgaatgcggatttcttcacagggacaaggtgatgacagggcaaaaggtgatcagtgctcgatatggcaccaagcttagcttgagcttggacgctgttaccccactcctcggcagccacggtgccaccacaagcagggaagcccgcctttggattgcgccgctctcacctcgtcagcgcatcctttttcttcaacaacaattcgccctttcccgcctctcttcacctctttcactctactctacctccctctttccacaaggccgccctttctgatttcctcccgacctccaggcatcagcccaaccagtaagtagttctcaaacacatctttcgtcactcaacataccggtcgattttaccggcgccgcccggtggacaccgttcagacgccccgcggttcccgttccggtcagtgcagaaatggggtctcggggtacatgctcgctgcattcaccaagctgagtcgttcagggtgaggtgcttttcgccatagcacccttgccgagccgggtgacctctcaccctctgctggagtttgctcgagcgggtcattggacgaaaccgccgagtggtggcagtcaaaattcgcgcagtgggaagacgaaccacccactcagcctttttgggggtgggagaggggtgtgtgagctgccgtacctccgtgcctccggtggccaagctttatcgtttctgccgccgcgggctccaccggcggtattttgtttccttccctcccacccgcgagagagcttccatctttctcttctccctcttttttcctcttcaacctcactcgacaactctgtttcttgccctgcgcagcagcagactgccaccccctcaaataccccaattggctcgtcgtcgtcagaaagaaaacgtcttgtgttgttcacacccttctacctactacctaccctacttgcacctcgtaccgcaaccttaaactgtaagcagtcttttgctcgccaattggtccgaccgagcacctttttttttataccagttttcacatgccccgttgtcaatggctctgcgccgagtggtgttttgagtccttttcggagtgtctcagtcgagggacccgagctttggcaacatgacggatgccaagcgatgtttggagcggcgtcgcaaacaacaacacgcgatcaatgcgacaatctgattttattcaagactttctgagctgctcactcgcatcaattgtcttgtttctttcaattgccagaacatcctttgctaacaaaacgtctcacagccttaataactaaaatggccgccatcagcaccgtcgtcgctcgcgacacctatgccgccctctccaagcgccaaaactgggctgcccaggagcccggtgtcatcaccgtcttctgcatcgtcggcgttgtcggcatcggtctcatctgcctcttcatctacaagaagttggtcgcccgcagggaaagacgccaggctgttgtctaaatgacacatcaccctgactctgcttttaaatcacagaggcgttggaagacggggaagatggaagggcgggttggaatgaagtaatgattcttttaaaagaagaacggtggacaggttcatctcatggaagggaaggggggatatgggattggatcaattggaaggatgagagatgggatattctcttgtcctgaggaggagcggatttgggattaaagatcgatcgatcgatttgcaacgataccctgcaatgtattctcggcgtgcgtaccagcagcacagcacaacacacagcatcttacattttttggcctcgtagccaaatttacttcttaatcaagcattcaagcatgctttccccccgatttgtacggattgttattttggactaggggaatgtggttggccgagaagcgaaaagaaaacaaatgaatggagctggcagattggggggggaagcaattgcggttgattttgtcctgagctgcaacaatcatcggatcgatcgggccatttacctctggcgatattcttgccgtgaggggatgatgaaaaacatcccatcatggttgaatatctgccttgatggggggtggtgatatttctctggaaaggttgggctgttggggaggtttacctgatggcctggacttttatatgttgattttacactttttttgttttcctattaaggcttaatattaaaacttgatacctacctgttactgttgcacctgtgatgtgatgggctgttgatgtatgtccattgaggctcaaaaggaatagatttgtcaggagcgtgtgtcacgccgctggatggtgttggggagtaccgtagcatgggaataagtcgatgctgggaataacataaaccaagagggaagaaataacgcacacgacacacgacgcgcgacggcacataatcactcatcatctcacggatatgttgtaatgttacacagcataccctacctaaaaacctctgagcacaaccggtttcccctctgcagtcagccagtcagtcagcaaagggtcctcctcttccatgtgaagctacagagttgcctcgcccagcagccgtttccccgagcgccgccaagcaaaggggttgggaaagcatatcgcggcatggcatggcatggcagatcttgggaaagcggtctggggttgagcggttggggggtgggggcaagcagcagtggaagtctatttccgggttttgtatccgtaatcctttgctttcatgagataatcatggtcgggtcctcaattgtccctctccggttgaatgagagggctacatcaagatgaatcaaataccgatgtgtgaatactggcagtcaagaaaaacgaggctgcaaaatagagagccatcgacatactttgtctcacctgtctcagactcatgctgtaaactctcaatcgacagccattcaagaatcgtttcacaatcaagagcacaatcacagtcaccatcacgacaccagtcaacattcaggaaacatcagggttccccattttctaccataatactatctcggatgctccagccttcccaactccgctctccttatgcatcaccgttaaacccagttttaaacccccatccccatcctaatgtctatcaagtgccttttgatgtgccgctcaacatgaccaagttttcagaaccgaagattaaaggttaagactcgagaaagaaaagagcaagggtactgaatcccctcaaaacacgctcgaagccaaagcaaaggagttgcaaagcttagaagagcttgtgctcaagagtcatgtcggactcgggctggagacccaagcagccgcgcatgatgttgacgagagcggagcgctgcttggcaagggcgttgacaacgggtgtgccgggaggagtcaagggagccttgagcatgtaggagaggacagagagaacgctgtggaagccctcaaagtccttggtggcggcgccgtcggtggagacagccttccaccggatacgggtgaagagctcggtgatgaggaccaagtcgatgatcaagggggaagcgagaagggagtcctcgcacacgttgaagagcgaaatagtctggtgaccgccgaggaagatctcagcatagtactcatcaagagcacgcttgtcgtcgccgacagcgggcatgtacttgatgacaacggtgtggtcgggcttctcgccgggggcgtagagaacggtgttggcctccaccatgtcgtcaatgacgttggacttggagatctccttggagcggaactgtctctgctcgctcaggttcttgccgtcgttgttgccgagatggttgtagctggcaacggaggtaagcttgataccggcgttgatgaggaagtcgacgagggccgacttcatcttggtctggccagacttgaagtcatcaccaccgacgaaggccctgtggcgctcggcaagctcaatggcaccgggaacgaaggtgttctggggggagccgttgatgaagggggtgttttcgaggatgcaagcaacagcgaagacggtggagggagagacctcctcgtggccgttctcaatggccttgaggaggttgtcggcagtgtcgttgacaccctcaatgaggtcagcgaaacgctcagtgttggcggtccactggacgatgacacggtcaaggttgttggcagccttgaagtcactgttcaattcatgttagtcaaaatgcttctcagagcagcttcaaaaatgtgcaacgtaccgaatgtcctggcggatcttctcaacgtgggccatggaggccttggtgccctcgaggatgttgtcggcacgcttctcctggttggcagcaatgaagtcggggtagtagatgctaggaagggggaccatggaggccatctccttggcaaccagagccttgaggccgggctcgagaacctgggcgcggtccatagcctcggcgaggttgagcttgctgatgtcccagccgccgatgacaatgtcgttggggtggaccatggggaggaggtcgtggaaggggatgttgacatccttgcgggtcttggcatcggtgccgagcttgatggtagagcccatgatcagagagccgtagtagttggccttctgctcaccgcggcgggtctgccaggagagcccgcggcggttggcaatgatgccggcggtgacggtggaaccgttgttgccgccccagccaacgagcatcatacccagcttggggaccttggtgtcgacattgaagttgtactgggtctccttggggaccgcaacatactggccgttaacctcggacacctcggtggtgtgataagtgtacttggagcggatctggttgtcggtgtactcgacgttgggggagttgaccttgaaggtcaccttctggttggtggaggaggaaacgccgccagagttgacaggtccatcaccgttcgcgatctcagcgtggggagccattgctaaggttggagagttgttgattttgcctggatgctgagagtgaatttatcgggtagagatgtaatccgctgagcttcctggagaggcagaacaacgggctccggcgtatgggtgatggacccttttatacatgttagcagaggtttgtgaggaggcagccggaagggggacgagttgaggcattctccgccaaagaccgtgatctcaacagaagcggcggttgagggagcacgaagagattgccaggtgggctacaacaaagggtatatcaggggcgtggggtcaggggacaaggagacaaggggggggggggtggggaggagcatgtggtagtggtagtgtaggtaacgacatgggacaacggagtccaaaaggacaggtgttgacggtatggcggcatatgcgtcgaagttcggaggagcaacacttacgagttaagaaggttggagaacgttttgacggtgtcgtgatcgcggccctggagctgcgatcaacaaagctgagatgggagcaacaaaaggttcgaaagggggggggtaatgtctcgagtcagactcgagggagttggcttgttttgttcacaaggaagtaggcaagacgaagagcggaggagcacgagacgacacaatcgtccgacagcaagtgacaggaagggccttcctttttatgtttggggaaaagaccggacgacgtgggcggtgaaagaaacaaaatccgcactataaccttggggctccacgtttcggacaagtcggccgttcaaatcaccgttcaatggcgggggcccggggtccatccatgagttgatcggatgaatgcgtagcggcggtcaattgctgccgggaaacatcgcgtgtacttttccaaatcacaatcgagacatatttccacggtagagacactgcgagctcagagctttgggcatagcgcctgcagataccaagagataagggcatggggaagagctatgcgagcagcgagcatcgagcacaagcagcaagcaggacgcaggccgcaccggcaatttcctgatcgagagagagccttctctgtggattgtctggccgttggatgtcgccagaaagtatagaatgcacaacctacccacacagcaaataaaaaaaagctgccccgccatccccgctctgccacagcacggcagcgggagggcggggggcatgtctcggcccccgatttcgctgattggtagcgggggagcggcggagttgacccgtccaaccccaacacctaccgacgccgggcggcagcaggtcgcccgaagaactgacaccgcccgtggcttcagtgctgtgttttcgatgagaggagagtgagggtttacttcttcagtggctgctgtctctgcaggacgagtatccactgtgagctgtcaagccagtcaacaacagcaaattcataccacccgcgcccgctcccggcccggttggttgatgttgacgttggtagtatcagactcgaggccgcaagggtactctcgccgttcggttttaattcgatccgtacataacatatgtctgcttccaacttccaaatctgtcaccgcgcagccgtatggctttcatggcttgactatacagttcgaggcaaggtatcatgataagcactaaaagcggacaaatgtcgttctgtatcacgatattccacctgtgttgttgtcctgcagtcttgagggagttaccattcaccaacgaacacgagccggcaggggtatgtgagacatgcagcaaaagtgatatctgattttattctggcaataaggtgatcccttgcctcatcattcgtcgacgctcccgagcatttatcagggagacacagcagtctcggtcgggctgtcgtgtgtataaccaaacaccgagttctggtttgttggagaagatgcaccgtttcctgcccaccgctcttctcgggaacggtgccgtatatggcagctcatcgatgcggctaagatgcttgtaaaccatccaatcttgaacttcccagagggtggaactgccgtcttcaacgtgtttcctgtagtttagcattgcggcagtgtgctgtgccctgagacgcgagatcccctgaagactgtggggaaacctcgaaacgaaacctaccaagaccctcgacctggcatgctcgatcctggtaactcactgaagatcagtcttttgctggcaacgattgactgatcattactgagagttggagaagagcagagaggagcgacgtggttagtgtaccccacgcctgtgccgaactgctccgtctccagggtgctcgttccgtgcgagctctactacaagagtacctgctcgagaaggctgggccggaaatgcttctctgtggctgcttgtgagtcgtcttcagtagacatatactatcatgactgcgggagagtttactcgttgtcaccccactgacgtgatgagaaacccttcagtcattcccataggcccagccttgagcctccgcagctgcaaatcaataaggaagggttgacgtgcagcttcttagtgatgaggtgctggtcaacagtggcttgctgcatcgatgcattgtcgatgcgaggcaggctcaggcaggacgacgaatccggccagttgtgtgcaaccaacatgagatcctcgacgtggggttgacagtttgcagaggtgccataggttgctcttcccgcaccaccccaactatttgtttcgctccagtcaaaaagaggttcttacctgcaagatcgatgaacagcattgagggctgtgtggaccacaagcaagccggcggctggcacgggaagccgtcataatctctccatggttttcgtgctgttccgaggcacctaggcgatgcttgcttttgatcatcccgccctcgtctatcctgacacaccaagtcggcctctaaacgggctgtcaaggcgagcgaatctgatttaccgccgcatggcaaggtcaggaaatggcccggaccagtcgttcgaccttcacctcccacactctggacgaggcggggtaaccatacacacagtgcaaccgccagactgccctacactcaaagtcgtcagccgatactctcggcgccatgtctccaatcttattggatatgcagggtatgaaactcgccctataggtatatacctctgtatagatgaatatcggaggtgagggcaggtcgtcgtcagggccgggagaccgaaagggaaaatgtggaggtctttctggaagagcaccccagacaatggttcatttttctcggcaacagccttttctccagacagatgcgcctctcagggctcggcagggggggcaaagcagtgcggaacgatggctcggcagggcgcgggttgcttgctttttcgatgcgtccaatgattcggcacatcgggcgcgtcaggaaggcgatcaatcttgggctcgctggccccggcagccattcagccgccttagacggccttgttcgattttcagcgagatgagaaccgtgaaaagccggaattgtcgcgagttgttggcagaggtggcaagcaatgccaactgatgagggtcagatgcggtgtgaacgcattggcaggaacactcttctgtgcctgaaggctgcattcgggtcactggaccgagcggtgaggccgcttggcgtggagagaaggttgcagtgatgcatcgccgtctctcggaagaggggagaaagccatagcgagtatcagaaaatatcgcagcgatcgagggtgggaagagggtattggggccaagaggatgctgagacgcgggaatgtgttgctggttcaactgaaaaaaaagtgtcaaacaagtcattcatgctggattccttcatgaatcccgtcatccttgatcgatcctggtgagtatgattagtctctaaacgcaccaattgggagctgtggtgaatgtacatagcttactgctggtgataggtgaggtctaagacagaaagccactggtagttggttcaagagaaaagtgggcccctcgagattacaacaagccactttgagggtttgtttggcgcgccgttgatgtttggtggacgggtcatgtttgatgctagagcttgcctcaaggtgaaggtggcatcgcggatctgggccacgggcagcatgaaaagaccccgaaatgatctccgataattttgaagtcgtgcgtcgggttgactggatgcaacacacccttttgtcactcgtccttgtgtcaccacccttgcctgccggaactgctgctgatggtcagaactcagaagcttctccttcaccgtgcatgatgggcgttggtgatagccgttttgggaacaaggtgagctggcacagcgcgggtaggtagagatagatggagatagcagagagatggcagagactgtctgtagtgagaacgtgtgagtgaggttcaacagtcagggggcctggcctcgtccattttgatttccgccccatcttgtggccatcgcgcacatcccggtcggcttcaatcagaagtcgtcgataattgcggaggcgctcgggcctagaacccactgcgaacgagggttccctgggtggctgccgagggcccgacctgagaccctttttggtctcttcgtctcgacagggaaggccggggtgagcagggccagggtcgcggtcaccgtgtctcccgcccacgcaactgccagcgcccgcgattcttcaactctctccctcttctgcatcccttccatgccgtcaaaccgccagactcgacccccgagacacgatccgcaacgcactcgtccatcgcctccccaacagatcgctcattccgtgcatttcggcaagtttgccctgtgcatagccctgacgagcttggcatccctcgggcctcttgtgtttgcctgcttgcgagagccggtccctgtcttgtaaaaccagatcagatccctcccgctgcacctcatcatcctgaacatattaacgattgctggaaacaattgataacctggaaccaccaccacttcgaccccggacctaatctcgacgacaactacggatactccgaacttccctgtctatctcgactaccgtgctgctgttatcacactcatcactatatatatatatacctacataaaggcattcgccgggttcaggacgcgtggactggggaacccggcggatctggatagcttctccggacagttcgagacttccccgcaaagccggagaccgagacgcgccttcgattcccatgttttcagtcggacgacacaccagtgacttgcaggaaacgacgctgatttgggaatggccaccgtgggaagagaggtcgagcttcatgccgactgtgaaatgatcgtcatgatggcttacaagtttgagaatctccctgatgggagaacatgaatgttcggggccgccggcggtggaaggtaggcggttgattccgtttgttcaccccgacaacttgctgaccatgcattcagaaacaccgccgatgcccgccccatcactttttgaaagatttaacccgtggggtgctcctgctgcgccaaaggaccagtctcgggcaccccctcaagtggacacctctgctgccagtacgcttgatgcatctcgaaccatggcaaatgctgacgatggttcagatcgtgcctacgcaggacaaggccagttgacgccagtgagttcactgtcgagtggatcacaaccgagcgagcagaacatctcgcccaaaacaccaaatgctagacctgccactgacaagccggacgaattctttgctcctcaaattgccaatgattcgcctccccctcaaccaacaaggagatcagggggttatggggggttgggtaacgggactgatttcgacgaccagctgccgccatcaaacccagcaaggaaacaatcaccaccgaatctaatggaacgcctgaattccatcgctcccgggccgtttgatgccaacagaaggccttcgagcagtgctcgtagcgatataaacgatcgtcccggtacttcagcttccaaccttggtagcttgggtggaggacaggcacaacccagcctgagaaagaacggctatgggggttttggcgttcctgcgaggagtccgagtcggcaggaagacaatcctccgccattgacacccagtcgcgccgatacatttcctcgtccgaatgaaggctttccgccaccccagcgaacaccttctgcgccacccgcggccttgagaattcagccgccagacagattacgtgccccatcagagtctttttcagacagagatggcgggacatcgccagacagccgagggtccatgatgagcgacagacctcgccgtcccagccgtgggccagacacttcgagacctccacctcctcgcagtgctacactccgacccactacccctggtctcccaactatcaaccttgctgaggagttcggcgttgggaatccttaccatacgccttcggaatcgacaggatcaagcgtgtctgttcacagcatgtcggtacagagcgtgtcagcccagagcagttttgagcgtcgccctagccaagcgagctcccgaactagcccacccaggtccatagcatcgagatctggacggaggaagccttctgacacatctagttttgataacttgatgtcggatcttcagtctacaatggacgataatcagcagaaaccgccaggtcctgcctctctcaaaatgccatacaagggaggtagagatcggccatcgccactaagcgctcgtccgccaccgccagagggaggatatgatccacgcatcgacccgcgtggtcagcgacgagcagcaggaggatcccctcttccctctccgttggagatctcgccgcttggcgaaagccctgccattatgacacctagcatcttgacacctggatctggagctcagccatctccaggctggccgaccccgaaaccggaaccagctcgacctcgtgaacaggagccgcctgtaccgcaacaatcagcgttgagagagctgcagggagcgtctcccatggacaggtcacaaggtccgcaacgagcaccgccgatggaagcaccaagagagcttcaaagggcacccacgatggaagcgtcaaaggagacccagaggccacccgtggagccttttcgacctcagctccaaagagcaccaacaatggaggtcccgagacaactccagagagccgccacgatggacgagccaagggacatgcaaagacaagatcccagcagaactccgcaacgacctcgagacccccgtgacgagcttcgcgacggcagacctctccacgaacgatcccgctcgcaacctcgcaacttgcctcctccctcggcccagccttcccgcggcgactgcaaggcatgcgggctgccaatcaaggggaaatcgatttccagcgccgacggccgtctcaccgggcgctatcacaagccgtgcttcgtctgctcgacctgccaggaaccattcacgtcagcgacgttttacgtcttgaacgacagaccctactgcgagcaacactaccacaagctcaacggcagcttgtgcgggagttgcggccgaggcatcgagggggagtatctcgaggatgagacttctcgcaaacaccacgtcggatgcttcaagtgcggcgactgcggcatggcgcttcgtgatgggtactttgaggtcaacggcagggcgttttgcgaaaaggacgcctggaggcgggtgcagcagcctcctcctccgcctatgatgatgggcggcggcaggggaatgggtggtcctcccggacgaggaagagggggcatgaggccgccgggaccgatggggctgccgggggcgaatccgaggtttgggccgaacggtccgtatgggaatagtcgacttggaccgggaccgagaccgaagatggagaagaggatgacgaggttggggatgctgtaggggttacagttgaacggttatctatctgatcacgccgaaccgaacctcccttccccggttaatattaattcgacattttcgacaattcttgacgctgagctaataacatgagataacggcttgacgtctgacactttttttttctttgtttacggaaactcatagactgaggaacttttttttcttgttggattcggctttttatacccccccccttattgtggatttggcttcgtatatatatatatatatacccaccgggatattctggacaggttgttgttgtccttttttatcctttttttattttttatgatacgataatttcaggctggccaacagcatatttggatggaatatttttggactggtggatggatggatgggtggattagggtctgggatagggaggggagggaacagagggggagttgtggaaaatgcatttggtggtggaaggatgggatttctggggatggggaggggacatgattgtgttgcacgggttggggggttcctgatgtaagggcccggtgattgcttgaatttgacgtggtgatacgcgacgggtgtgatggatggatggacgggcggttacatgagatattgaagggggtttgatgttgggatatgctgtgcgtcgtcatgtcatggtgatgtgtacaggcaggcaggcaggcggggagatagctgagattttggaaaagagacaatttttagttgctaatatatggaagacatattgaccgttcctgttcgctttttggggtgatatcgaggaggtttgatgacggcatgggggtgtgaaaaggtctgtctatctatgcaaaactcatctggcatgttgcgtatcagattcccgtggacgggtagatggactttcagacagatgcactccgattggggttatgatgtggtggtcggtacctacccggcaaagatggccgatgagaaatgatacaacgatactgtgggtgtgttttccattccagatagtttgcttgtttcaagttgggtcatggtgttccactgtctcgggataataccgagagcttgtactccggactttgatggcgaatatggccacgactgtctggagcccgggaggacgtttgagcaatgatggaagtaccgaacgttttgctggcttttttgggggggggaggaattgctcctgttgttttgcgggatatatatgggattagagaaggaagttggtgtaatgtagctctgcaagagatcactcgtccttcaggtgccttggggatggttcaagtgctagaaatgcggttggataggtattcgctagttacaaaaggttgtggtgtttatgggtaagttcacgtaggtagccggtgtcccatcttctagatctatggtttctgaaggagaatccccaggttagtaagtagggtaggtgggtactcggtcatcctttcattttcgaggcttgccgactgggacttttgcctagagttcaaagaagattgtccgaaaaggaacgccaacagattcgatccgggtcggtttatgtctgggatgagagggaagctggcatgcggaggtggactgatggaaagtcatggagcgccagccgtgtgtctgggagttttttaacataccgcgagatggaaggcaagcgacggaatggttttgggaactcgaggagggggctgggagaactccggattcttgtcgtggcagtgatgaggatcaggatgatggggagccagacagtttggcggctggtatagatcataccatcagtgctgctaaggaatcgaggctctctccaacttccgcgaggccagcccgctcaatgtgtacccaatctccaccgcccatcccacaacaccgtttatacacagctcgcagaacctccgaatagagtttaatcacccccttcttgaaactgacgatagccgatctccgatttgttttgacaagcattatttcactcaatcacctccggggaaaccacaaccgaaattatcatcctctacaccgtctcctcctccacaaaaatccgttgttcccttaatgcgcgctagaaactcgcttcgaaacgtttacgccagggggggcgaacggacgcccgttgccaagtttcgctgggctttttcttttttttcttttttcttactggttttccgccacagagatcttgtggacgatgaaaaatcgtcccctattgataatgattggcgttggggggaaaatgatgtgcacaatctcaggtgacactgcgtcgtcgattccctgtggcttgccggctgggtaaaataggagagagtcctttacgatcgacagaaactcgagggatcattatatgatttggcctagaaaagataaagaatcaacttaaccaaacctgtgtccctgacgatcattgcttgtttggcaggttattgtatttacgggttgtatgcaagataagatttctaatcagccggcagagaggacaaaaaaaggcttgtttggatttggcattggagttggagtgggagtttgggactttggttaggtgggttgcaatagactaaaccaaagcgccagaaacaaaagtttcatttccctcggcggtactcgttgaattattgacaccaaaagaacggttcttctgcaaaggacgacagctgagccggtgcggtctccggtgtgatgttaccatgctagattaggtgtagatattgtgccgtagagcacgacgctgcggcgtgggaggtgattggttgggtcaggacacaggtctgcgtaacctcagttggtgatgggaatcgtggggatagatttgaaggatcaataggcaggcaaggctcactggagcaaagggtcttcgtcgtcgtcgtcaaagtgaagccatcgtgggcttgaatggtgaaatggcaagcccatgcgaggagggccgggatgcaggtggcttgtgggacgaactggtggcttggtggcttcgattcgaggtgcatcacacacaattgtgactgtctctcgtgtccgccgagtctcacacttacttcgtgttccccgtcatgatgtggtattttgtgcctggaggtgcagagacggattactggacttggatatatcatgagggcgtctgacgttctgtgtgaacatggtataatgaggattcaaatcttacgtacttgagctctcgatgttgcggttggttctctgtgacaggtctagactctgggctagcaaatcccctgctcggggtagcgctgctcggttgggtggccgttggcgtcatttccgcacccctgtctcatcttatcagtgcatgcagcggccacaagtcgttacctacacgtgctacctcttgaaaagaagagaacttgaagtgttacgtgtccgaggcggtgggatcaggtttgtctccctcgtgagagggcgatcgttatccatcgtgcgacagccacgaagaaaagagcgggtatctctgctgcgataacccaggaaaaggcggtcgatctgtcaaacgattccatgttgaaccagaaacagaaacagtcccctaattcggaagtgggcctgggctgcattggccctgtcgtgcgctaagctttctccactccctgcagaaatcttcaggggctttcccttgtttatcgaaagtcgagaagggggcaaacgacaggtcggaccgcgctgcccccacggaccagaccggccgaaagatacaagctcttgtcatgcctcgttctgtgtgacctgtgaatgtctcgtcttttttgctctaccttgattgaagtacttctgttctacacagaacgttgtcgaaacgtttcccgttatcgcaccagaaaaagcgttggcttcttcgtgcttgtgcaccgaaaacgcacgtaggactctgggcttttttttcttctggcgctgaggcgtgccgctctcaacttaacctccgcttctccctttttatcgtcaatttgcctaatatcagctacggtgtgggtggccgccagtctttactgccttcctttttatcccccaatcggcaatcgcgatccagtatcgtgatctcagctgcactctcctggtttctgcgaccgactgccaacggtagtcccctccaaggtcgaccgaccgactgagtcgaacatcgcgacttcgttttccattctctaggccgcagacaggacagcatcgtaccgaaatgcccgtatagcgccgatcgttttacacacctacattcgtttcacgtttcccgaccacatcgcggcgttgaccaccaccataccaaaatcgaaatgttgacaaaaacacacattcgccgagtgcttactcggccaaaaacttatatcccggctcttgcggtgtttgttctctgctggatcctgctggcgcaccacggtggctatagagtggttcctttctacgaccgtccagtcaacactgagcgcgacccaggtacggattgagttctccggacggatactggcgtttgctgaccacaaaatagatgagcgcaaggagcttgcgttgcaagcgcaaagacaactgttcgagaaagactggcgcgatctggaaaagtaagtgacaccctggaaagccatttcaccatctgcttgacgctaacgttcgtcttctaggaaacctggactaggcgccgtatatggcaacaccttgaacagccttaccgaccgggacaccagaaagccatcgcacgaggccaagctgaccctgggtgacaactccacctccttcaccaaggaacgtcccgctatctacaacccatatcccaagtacaactcaaaggaatggttggccacccatgccctgtatgtgccttgcattggagccacgggagacgaagtcgaggatatcaaagtcttcaggggccgcccgcgcaacttccccgaccccggctttggaagctacagcacgcttggacttgaccgcaacctttgcttcgaaagagagactcggatgggccagtacggagtaaacccggtgatggataaggacggccagccggtcaactgggacaaggtcaactggggcgagttgcaatccaaatgtgttgatcagaatcaggcacgttttgccacgagcggtccgccgaacgcctatgtcgacgaggaggaggacagcgagccttcccccgacctgaaaaagtacgacgagtctgccgagaagcagacgcccaaggacctgttggctacattcagacggttctggcgtggtccggatgcccgcccgcttcgctcaagatcgattaagggcgtcttcgagaacaagcgcgcgtacaattcgaccgtcaaggccagagaggccagaaccgccattctgctgcgatcctacaccggaaaggagtacaatgataacgacaaacaagccattcggtcgctcattacagagctcagcctgcgaactggtggagagtatcaggttttcttgtttgtgcattacagagaagacgagttcgatatctgggctagcgaggacctgtaccgtcaagcgattgagaagcacgttcccgaggagctccgcagcatcaccattctttggaccgagggagccgttgacaagatgtaccccaagctcactgtcaaggcgaggaaggtgcacaacggccagttcctgcctgtccagatgtttatgcaggagttccgggaattcgactatgtttggaactgggagatggactcacgggtggttggccatcactacaatgtgctcaacaagttggctgagtttggccgcaagcagcctcgacggggactctgggagcgcaacgagcgcttctacatcccttcttactatggagggttcgagtccaagttccgccaaacggtggagagacaagtcggggatgagacgatttggggcgctcccaagcttcctgttgtcaaccctgtcggtcccaagccaccagtcgagaatcccaaggacgacaattacaaatggggtgttggtgaggaggccgatctgatcaccctggcgcccatattcaatccagtcaacagcggctggattatgcgcaaccaggtgtggggataccgaaacctgaacttcccatggggcaagctacctcgccgggctacgatcattactcaagtcagagcgtcaaggaggttgattgacgtgatgcatgctgaggatctcagaggcaaccacgtcgcctccgaaatggtttctcagaccaccgctctcctccacggactgaaggctgtgtatgcgcccatgccagtctactttgaccgggcgtggagcggcagccagctggccaagtggttcaacggaggccccaaggggcaaagtggcagcttcggcagcgccatgggatggggacaagaggggagatacctgggcagcacatggtactaccgtgccattccacctcagcgattgtacaacaactggatggggtacgaggacactggcatcggcggccccgagtgggagcagaagcacgggaggacatgtcttccttcgatgattctgcacccgatcaaggaggtgaagccaacggagaaggggtattcgactgattcgaagcttccttatgattgagaggggctacaagacaacaccagccggtctgatggaaaacaaacaacaaaaaaaagtatcccgccgagttgcttggtttgagaaagaggctgcaagggttgaagggcaggacgatttactttttttttttctgcggcggaaattttggggggagggacgagggttatgaagccaccacatgcttttctttgggaaagggcagatgtaccgcttacctaccaagcaactcgtttattcatgaggaggttaccccaggttattgtaaccagatcattggatctgggggtcgcgacctctggtggagcatcatcgtcattttatcatgggatgcatcacatttttatataccccggatcatcatcatgaatatggcctccccctgcccctgcctgggggaggggggggggggggttgtgggatgacatgtaacacacacacacattgctgcttgtatgataaaaagccacgatttgttttgggagtttttggagttggtagaatggatggatgggaaaggggggtagggggatagcatggcatgtttttgggagcgtgattcaaaaaaagtactgtatagataattcttaatgaacggaatggcatttttcatgaatattttgtttctttatgttgagtattgatgggaaaggggcgtgtcaaagtgattcctctggcgggttggtggtttgggtaaaatcaggggtccacccttgttcaaaaatagcaccgcgtgacaggctggctagtggtggaagagaaaggatgatccgatggggattggatttgccgggtttgtaggtgatgggatgggatgggcttctagaacttttggatttggaggtgtaggggggcaaaggagggagaaatgtgaacccgagtttgttgacagtttttcgggggttgatgatgatatctacgatatgaaaagtggtgaatgatagggaaggtgggtcggatattaatcttttggatcacctagcaataccacatgccatttccatcttagatgggtaggtgtaaagcttatcattatgttccatgtccggcaggcgcggaaggatcctagtaggtatcacggtagtttttttttgttgttggacttctggaaggtgcggtgtgtaattctcgaatgatgcacgggaacggagacggagagacagtgtgctggagtggtgtaagtgaagccgggagaaccgatggtgtaagacatctcaactcacttcctccataaccaggtttggggggagtcatggccagcagcccagagcgggaccgaacaggaaaagagttcggtgttaagacccggaagttagaactggcctgggggaaagaaactccagcccaagatggggaaaatccaacaatgagaaaatggatagcctcaagcacgacaacctgggattgacagggctgccgttgaaaatcgatctcgtggcgcctgtaagccccaaagttgtggagcgacatggtcagactttcagcgcttgaacaacgccaaatcagcccagaacgacaagccactgttcatgctgagccacaaacgccttgggaatctttgtaatacctgcgttttgattggacagagatccaaaatggggtacgggttgtggggatgtggtctgggtgagtcgattgatggacgacccattgttcgtgtttgccgggtggtccgttgaacttggcagtcacacggtgtgcggtggtggtggtcaaagggcagggctgccaggtgggctgggctcaggcaccggagtttgtggcatgtttgttttaaaagggatgaggttcccgcccaaagtctgaaggctttttggtctttttgttcttatgatcagtaaagcatttattacctacacagacgatttttgatctggggatctggaagtaccggacaaacgttcaacaaaacgagtttcatcaacccagccaaccacaagctctccacttgttcacttacacgcggtcttcaacaacaaccacaaccttttatacaccaccgctctcaccaccaccaccaccaccaccacaacaacaacaacaacaacaacaaacaacaacaacaactttcttctctcttaaagttcaactcacaaaaacaaagccgtcaaaatgtccccgacacacaccatgtccgcccacctctgcaaacaaatcgtctcctcctggcgcgagagcagacagtccaacaccaccaccagcagccccctcccttcccccccaaacaacatgggctcctacttccctcgctctctctcttcctcatcatcaccaaagacctcgctagacaacggcgaccgtcacgacacctctgtccctctgtcaagacaaacgttcaacaacaacaacaacaacaacagcaactggagatgggggtcccgttaagcggaaggaactgattggtccaaaaagggaaggaggaaagaaagaaagtgttatcgtatgatttgagggaggatatcgcaccacccaactacaccacaccacaccacaccatttttatttaatacgactacgaaccacccacaccagttactagagagagggagggatggatgcctggatggggtatgccgagttatgcaggcccatcgttggtggtacacacaccttagacttgggtttgaaaggagggaggtttagtcgacattacacaacatgaaatgggcggtggaatacaagggatttttgggctggactactggactggactggaattggatggcgacattctacaatgaagagagagggaacatcattcgcagcccgcacagccagcttggcagggcgctggacaaacacaacggagttaaacggagagggattcattgattttgctttgttatcatcatcattataccaatttactattttttcaccatttacttgaactatgtcgcaatatcctgcttatgtcactgtgggtgagagtgaaagttggcattttgccttgtaaggtgtgaatgagatgagatggcgcaatcgacactaacaattgacagttcccttgtgctggaaaaagaagatcattttgttggccgcttcggtaccgaatatctctataatgaaaatttggctcgcccagtcatgaatccataacggaaggtttctttgcgcggtgtctgttacgcaaaattctttcgagaatcgtgccatgcgagagggaatgtcatgccatttttatctaaaccgggcgtgccgcaggtcgccgtttgttgctgctaccttgaccgctgttactggtgtaagtgtttctcgcacggtgtggggaatggatcggacccggagagcggtacaggaaaggggagaaccggtgggaattgagatcggggaaaggtttataaggtccacattttcccgttgggggagggagatctaacgggaatgccggtgaccgggtttggctgccggtttttggtggtgcggagggaggtgatggattgataccatatctttctacttgctcatttgtgccaatgccccagctctgcatgttgagcgaaggctgtattggcttgacacacctgtttgagttacccgttggagatttgtctcgaggacacaggtgtctgtgttattcatgatctttctggcatcgtctgtggcgtgagtcggcgacagcaagcttggacgaggttggatgattctgggttggtcagtgaacgtttgtccccggctgaactattgttgtcctctatctacttgtacacatccagtttctcaagatgtaccaacccattcgcaggctgtcaaatcccgtcagcttttcttcatccccattcaatcataaaaggaagctactcaccggggcatactgcctcaacttcacccccgcctccctgaacaccgccgccgtatccccatccatgctatacccgtgactatacaccacctccccgatcccaacctgaacaatcttgatgctgcacgtcaagcacgggtgcgtagtgcagtacagcaccgcgccctccctcaccctctcccttcccgcttcaagcagggcattctcctcggcatggatacaaagacaagtcgtcaacccgtgccctgacccctgaccggcattgcacctgtcacatcccccctccccacagttgaccaagcccctgggtgtaccgttgtaacccgtgctgataaccctcttatccctcacaataacgcacccaacccgccgcttcatgcagtttgccctctgcgccgccagctcagccaacgccatgaagtaggcgtcccacgacgggcggagccggtcttgattcaacaaatccagcttccccagcgtggcgtacaagtgggcgagagaagaagaggtgttcaacaacctcactgtcgctcttgatatcatcgcctgggtgccgtttactggatcgtagagatgggagtcgtttagtgtgacgaacgactcgagatcagtaacttcatgatcgggttccgactcctcgtttggtcctttcaagaaccggccgtggttggactgggactgtcgagctaggaaacgtttccagcggacggtcaagggggcgtcgaccgagaggaggaggaagaaggggcggcgggtgtacatttcgagaatttcttctgagggaatgtcggttgttacgaagcggtcgcgccatcgtttggtgacgaattcgaggagttcttcgggggtggagaaggtggtttgggtggtggtggaggaggagatggaggatgggggggtggtttgggttgtttgttttggggagaggtagaggtgggtgaagccgtggtggtcggcgaggtagttggcgatggtgcgcttgccggcgcagatgcctatgatatgtgtaagtaagagtggatgggtgagaggccaaggtggtcatgtgtttactgccgcagattccaatgaacattttgactgttgagtggagattgaagattggtgttttgatcagatggagaagtagggatccgaaatgagaacgtctattctctcagtaaatatctacaaccatgaaactctccggccagctaaggtgtgtaataagtccgttttgaaatggcggagaacgaagacgcgcttccagctgcaagtcatcaacgcgtgagcgcgtcttcaagctcctcgtggccgatgattaaccggtgggatgtgtctgtcttcagttggccatgatatcaaacaatagtacattttggttaaggactattctatgttcacagtttggtcccgttccttatttcccatatctgatgggccgtattctagaatctctccgtgaccatcagcctttgtccaaggtggtggctcaggtaccttgccttgttcatggcggggcagtctggtatacgcttgaagcagatccctggaaagtgcggggcatcagccagagcttccttcctccacgccccgctatcgaactgaagctggtacctcccatctgacttccaacttgaaccgaatagaacggcagttgcgtatcgtatataatccaggtcttaccttcccaagcttgtgacacaccaggcaccggtcatccggtgatgccacaccacacctgaccaaagctttgcagcttacctgagacgcacatgtgttccaaggtgtatctatctctaacgctctagacgattcgagtcatccacaacagtattatccttctttgccaaatccaacaaagccgccaggctagatcttctcaacgtcgccgctttgaccagttcgcgaacagtaacttcgctccgaaatcgcgtacacaacttgcgatcacaaccccgcggtcagtcttccccaaacaccaacgaatcgagaatcaacccagcgaatcgaccccgcgaggcgaccacagagtaccatggcgcccgtcaaattcgtcccattctcttcggagatagaactaccgttctattcatcgcttttctcgtccaaactcgaccatgaccgacttgacgattccgcccgcgcggttttgggcgtttacgagccccgcgtgcaggccgatcccgaggccagcgtgaggatgcaaatactgggaaatgccctcacagccaaagagtaggtttctgcaaattgaacttttacattgtgctgttcgaactaatggctgacagtgacgacagcctacctgttggcacgagtcgcgcaaaggggtttatcaagaacgttaacaccatcgaagatttcaacaatgtcaacaagactgccatgatcgaggacatcggccggcaggtgtgtttattcttgacctggggccagttctttgtgaactaaccacgctttggacaccagatttgggatgcaattcaagacggcacaatctactcagttccctctctactgtcgtccttcgcgatcctttcgttcgccgacctcaaaaagtaccgatttacatattggtttgcatttccggccctacacttcaagaaacctctatgggaacgatctggcgacatcgagcggttaaactctggggaaagcgaagctctcgtcgagtcggttggcacatggcggtatactgtcagcacggagaaggagcatggtttctttcttgcgaagaagtcacggggcgagcatgccacaggaagaggacctgtggacgactcgatggcagaggaaataggataccagtggcaaatcgggtcactacgcgattttgagaatggcttcttcaacgacatccccgaggaggaccgatatgttgcctttgtggacccctcaaactaccctgaacacccttcatggccgttgcgaaatctcctggtcctgatctcgcatcgatatcggctgaagaaggtacagattctttgttaccgtgatacccaagcacgcaggcacgaggctcggagcatcattctcccgttgtccttgaacctacccaaagatttcgatttcgcgacggttcccgacgtaacaggctgggaaagggacggcggatcgaaactgaggcgccgggtagccgatctggccgagtatatggacccgaccaagctggccgatcaagctgtggacctcaacttgaagcttatgaagtggcgcctggcaccaaatctggaactcgacaccatcaaaaacaccagctgtctcttgctgggtgctggaacgcttggcagttatgtgtctaggaatctcatgggctggggcgtacggaagatcacttttgtggactatggtgccatttcattctcgaatcctgttaggcagccattattcgagtttgaggactgtcttcaagggggcaaaccaaaggccttgaaggcggctgaggcgctcaaaaggatctacccgggagtggaagccgaagggcatgtgctctcggtgcctatgttggggcacccagttaccaacgaggctaagacccgagacgacttcaataagctacaagagctggtcaactcacacgatgccgtcttcatgctcttggatacccgcgagtcgaggtggttgcctacgctcatggccaaatccgcgaacaaaatcgtcctcaatgctgcgcttggattcgacacatatgtggtcatgagacatggagccaaaccggaagatgggagtgaagacaccctgggttgctatttctgcaacgacgtcgttgttgctgccgatgtaagttttctggctgtccctattctccacatgatacacaaaactaacgagcaaatagtccatgaaagacgcaaccctggatcaacaatgcaccgtcacccgtcccggagtggcagctattgcctcggctctcctcgtcgagttgttctccagcattctccagcatccacagaggcagcacgcccccgcacctgttccatcagccaatggagaatatgaacgtgacccccctgagcaccccttgggcatcgtaccacaccagatcagagggttcttgtcctcgttcaacaatatgaatatccgtgggaggtcatatccacagtgcagtgcttgctccaagccaattctggaagcttatgcaaaggatggatggggattcgtcaaaaaggccctagctgatagggactatgttgccgagttgagtgggctggctgaggttcaacgacaggcggaagcggctgctgcagatgtggagtggagcgaggaagaaggtgacgatgacggcgagggtatactactatgacgttagtgaatgcttttgtagatacgggctatactggcgtcttggtgttagcggggtttcatggttacccagggtttaggtcaagtctttggtcttatgatagatgagatattatatgctgttctgcttgagatttatctgagaggtgtactaagagagtcgagaggagtgctaagttctgcagagaacgggcagaccacgacactcatcttgtctgtggtaaagctacaagcgagcaagtgttgccgaaactgctgcctccagtgtcatcacattgaccatctttgaagcctttcatattctgttctgtcaagtcgctatacttttgtccacaacatgattgctctcgcaagtcgaacccccggctagatgcccatcacgccaacccaacttcgtcctagccccgccaagctcatccctatcttatcccaaagcggtcaaacccgtcaaaacttcccgccccactttatttttcccttccctctctccccaaaatttccccaccaccaaacttggccccttcccttttttctccagcaaccaccccgacaaaacaaccgacaaagatggcgcaaggagccatcaaaaaggcccccaaggccaacccggggctcaccaaagccaagggcagcggcggcggagcgaaaaaggtcaacaaaccccaaaaggccaagagcggcgggagcgcagacaagcaaaagaagaagttcacctcgggcatggtggccaagacggagctgatgctgggggcgagggcggggcatctggagctgatcgggaaggggagggacaagacgaagaaggggcctgcgacggagagtaaaggggggagccggaagtttggttaagactgactgcgcactttgtatggtggcaagtctgggacggagaacgacggcggggcgggttgggagatttggaaggggatggaaacgacaagggaaaggacgacaagatacccattgtttacgatattgtttcgcgattcttgcatgacttttgggattggaagggatttggtacgactcaatatggccgacagactgctcgcttttgtaaaaattgcatttacgcctcgacaaaactctcggcgacttctctcaagacgccctctacatactttgcgtccctctcaacctcgaccctccacgtcgacacagcgattctcaccgccttcctgccttgccattgcgtcccgctcacaaacatcttgcccgtctggttgatccgatcaacgagaacattattcagcgcctcgtttctcgcccggaataacacaatcatgaagatgtcttcctcgacatgattctcagtctcaggaagcagctcgtaatgttcagagttgtggataaaagaggcgagtttcctggcaaggaacaccatccggctgaacatggcctccatgccctctcggccctcgcttttcaggacggcataaactggcagggcgcggaagcgacgggagttctcaaggccgatgttcaaagggccgaagatcccatcttcttgggaaccggcagcagaggaggatggcgggggagccaggtaggcggcgcccgggttgctaaacacttgagtgagggtggatgggtggcgggagaagaaaatgccgttgtcgtagggctttttaacacgcacacacacacacacatattaatacagcaagcaaataaaaagttgaaaacatatacaaaaaaaaactcaaaaaactcaccacattgagaagtttatgcccatccacgcagatactatccgccaattccatgcctgcgacacaggcacgcagactaagaaactggtctgttttgggcagagcccgggcaaagatgccaaaggcgccgtcgacgtggatccaggccttgtaacggtcagccaggctgcggatcttgggcatgtcgaagatggctgtggcgaaccggccggtgttgacctcgcccgaggagatggctatgatgcatgctgtgctgtttttttcagcctctttcagggctggttccaacttgtcgaggtcgattctccacggtttgtcatcttgtccaacatcgagcacgcactcctcccccaaccccaatatcttggccgcctgagcagcgaggaatggggttcnnnnnnnnnnnnnnnnnnnnnnnnnnnnnnnnnnnnnnnnnnnnnnnnnnnnnnnnnnnnnnnnnnnnnnnnnnnnnnnnnnnnnnnnnnnnnnnnnnnnnnnnnnnnnnnnnnnnnnnnnnnnnnnnnnnnnnnnnnnnnnnnnnnnnngggggtcgggtccggggtcggggtggagatctggaccggtgggtgtgttcggggtcgtcctgatgggcgggatggaggtgggagggcgggtgttcttggtgtttgattcggaggaaagctcccggcaatggctgacttggcaaggtgctaagagaagacggtgaggctcggaggatatttgagaagggccaatgacggggggaggaaaagtgcttgagagggatctttgaaagcatgctgtagatttgagagtgtcaactggttggtcatatgcatggcgcctgcggagtcggtaaatgcgagcgggatgggtgcttcctctcgggcccttaggcaggagggaatgctagttgggccatgggggaaaccatcgtcattcgacccctcgtaaacctgagctctgcaacaggttggagcagataagtggtcggggacacccctggcgatggatggggaaggacggtagccttgtaaccctctcggtagcgggtgtaacgtgaaacgtgcggaactttctttggactttttagattttttttctccggacatttcccctagtcggatgagatatcaaccggctgttatcaatctgtcctagtactagatgtgagcccatgacgggcctgctaccaagcgttgagtgtgaatggatgtctagagacgtgccaaggtcggaagacagtctgatggtgatagaaatatatgccccatttgagaaggcgataaatggaagccttagatgtgcagctgcaggctgttgttccatgttgcccctcacccagcgagccggtgagagtgaggggaatatcgagctgtcatgcagcgtgcagcacgcaacaacccgaagcggagactgctacacagccatctatacgggggaggccttctgataggttgagcttaattaccacgcgatacctgttacgcctctgcatcagaggttgtcgaagacgaaaagaaaacaaagaacgggcaagctgaccatctccaggcacccgtggacctgtttttcagcagccttccccaggtccactccagactccggtggtcttcggttagcggcaccgtgccatgaatttggccacatgccaacttgaatcgtgataagtcgcgagaacaggaagcaagatcgatggcgagaatgattgggaaagagggaagaccggcagttaaatattcgggtgataaacctcactaaaacccaggagtcccttgctactttagcgcccatgatcagcatgcttcccactacaacgggagttcccacacccaaatctcgcctgaacgggacggcacccgacacagggctcatcgtgaacatgctgcagtatcccttgctatcccttgtaaaacccccgtttcttcaccattccagggccaaagctagctccgtgggcaaaatcagctcagggtggtatgcgactctagggccggatctataatcttttgctgctgccgccatcatcattactccccaccactgatttatcaagagaaatttacccagttggtcacctaccttacccacagcgatcaggacctcccacaccatcggcggacaattgctgggtacgacactaatacaacttagctaggtaacggcacggcacagactgatcgatcaacgggcaccgagagcttcccgatctgccaacaagtccaagtccacaccacccaagggcagtcgagacccgttccgaactgttgggccagtgatccacgcacacgggtctttgttctgacagaacgctcccgcttctggatcacacccaaactgttgggtcaaggctgccgctcaaatcgacaaagaaccaagggaccagcagggagggttccgagcgcaaagggccttgcgtggaggatccggggaggagtcgccgaccgctggcttatacggtgttctggaccttgtgtcttgtcttttctcaagtaacatatttctcggccttctcctttgcccgtcccccttcgctacctcgtagtgtagccgcgccgcacgccaaagctccatctcggcatactctctctggtgccaatatctcaacaatggctgagtctaccaagtctggcacgtctgaagtgtcatcctctagcacggcctcaaagcctgtcgatgacgacaggttcacctttgagtctgtcctcgacgactcatcacacatcgaggctgatgtaagttgtccgaggagcatcgtccaatgtccctgtagccaagctgaatcctgttgcttctagtcaaacccccatgacatctagtatgaacaacctgcctggcctagtcaacagcctgacgcaagactgatgccaaccttttagtgacacccaatccctttccgagtccatagccgacttccgagaggagtttggcaggacatatcattcctaccgtgccggctgtatgtcctctcttctcttcctgcttcgaccttggtgactgacaactttgcctagcatactacttccccaatgaccccacggaagcagagcgaatggacgagcagtacgagatcatcaaggtcatcatggacgggcggcttcatctggcgccgtttacccgcgaaaagtacccgcggaaggtgctcgacatcgccacagggactgggctttgggccatcgagatgggagacgagtacccggatgctgagatagtaggaacggacctctcgccgattcaaccgccgtttgtgccaccgaacgtgaggttctttgtggaggattcgtatgttttaccctctctcccctatcaattatcctccgatggctaacacatctcccacagaaccgaagaatggtatgcatgccctactttccctcccactaaagccgctccccactaacatgtactcaagggactaccccccctcagaattcgacctcatccacacccgcgtcacaatcggctgctgggccgacatgaagaaggaaatcatcgcccgcgccttccaccacctcaaaccaggcggctggctcgagtgtcaagaagtccccggcatgccccactgcgacgacgggaccatgcccccggactacgactggctcaagtggaccctcgagctctacaacagctcccgcctcgccaaccgccaggtcgacgtcggggagcagctcaaggactggatgagggaagtcggctttgtcgacgtccacgaggccgtgttcaagatcccgctcaacggctggccaaaggacacgagactcaaacacgtggggatgctgtggcagaggaacttgctggatggcttgcagggtttcagtctggggttttttagcaagcatttggggaagacgcaggaggagattgaggtattcttttttcctttccagcaacatattttctttttttgtctttcatgatgatggagctaacgttgtggtataggtctccctcgtggacgtaaggaggagtctcttcaacagaaagatccacgcttaccacaagctctacgtggtctacggaaggaaaccggagggcgccgccaccgcgccagaagctgaggcaggaggagacacaggcgaaaaatagcacaccgatctcgggcgtgttaaaacactttttcacttttgggtacacaaacacatcccagaccagcgaggagctttcatacatgtcgatgataccttacggcgccaggttcccgtttctctcctttcaatgttggatgtcacgattcaggctaccgtggttgatgaaggaacaaagaaaatggggacaacatgacttgatgttgacgttacgtgccaacttaacttaggtaatgaagagccgatgatgatgactttggtgtgctcaacatattattaccccactgaaaacgcctacaggaaatcagtcatcagttttttcggctacctaccaaatcggcatcccactacctagaagtacgaacgccctgcttgcaaaaattccaacaagaataacaaacgacaatctgcccatcctcttcttataccaccgaaagaaacaaacacgcaaacaaacccatgaaaaccccacacaatctgttctttcctcaattactcaagcagtatgctccaaccccccctcaacagtcgcatccttcgcactgtcatccacatccaacaccttttcctcttccaccccttcccccttttcctcctcctcctcatcatcactcacctcccactcattgggcctcacaaccctaaccttgaccaacccctccacatccttatcctcctccttcacctggtagtaaaccctcaaccccaccgccacaaccgcattccaggggtccttgacaaactcatcttcttcctctgacctgtaaccaccagggccattcccggggggaccaccagggggcccacgggggagcatgcttctcaaaaggttggctgcgttgtcgtcgttgtcggagacgaggcagtcgagctccgagtcggagaggtctgggggggacatggggggcattatggagggggtgtcggagatgtagccgccgtcgtcgggggggtgctgttggggataggggcggcgggggggttggttgtaggggtagtagggggctgttagggctctagagggggggcaggaaggggggcaggaagggggaccaggttggtattgaagttggaattgctgctggggatgtgtgtaaaaagtagggggtcgggaaaagaggggaggctggaattgttgtaagtcggctgtagggggtctcgaagggggtctagaaggggggcgggattgggagccgggatgttgctgatacatatgttgggggatgatggggtgctggtagagagggtgaggcccgttgaaggggtggtgatggggttgggcggggtgctggtggtagatggggaccatggggggcgggtgaggttgacgaggcatctgttcgacgttgttctggtcaggtctggtcccgaggaggtcctcgagctcggccttgaagtgagagaccacttcgagagcttttttcagcttgagggtagcctcgggatggggatcgatgtctttggaattggacgcaacatcagcatctttggctgggtcaacagtggctccttctttatcatccgtcgtggctgccttaactggctcagatgtgacctccttctgtttggcttcctcgtcaggattggcaggaacattgctgctgccttcctctgcggcattgttcttttcggcattgttcttttcggcattgttcttttcggcattgttcttttcggcaagtgctcctgacgatgaaagggaaggagtatcctcgccgacagtggacacatcaggttcggctgctgcttccgcctcgtcatcggctttctcctcatgagcttcgatctcagtttgggtctctttgtcgagcttgggcttctccgcgcccgagtccgcctggacttttgactcggccagaggttgctccccgaccttcattggttcctcgccatccttgggtttcttatcgggctctgcgccctcctccacagcaacctcagtctgagttccctcatcgagcctcgccctgttgttgccctttggcttgtcagcttcatcatccgcttcagcctctgcctgctcctgctctgctgcctgcctcatatgctgcctggaatcccgagctgcgcgcctcttctcgtcacgtttcttctgctgcccaactctccatgccttctcgtaggccatctgcttcttcttttgtttgatttgcctcagctcctggcggtggatctttttctgatagtcaagatatcgcttccggacctcttcgcggtgcttctgctgttgacgtttcttaaaggcctcacgcgcagtcttttcctcctcggtctctgcaatcttggctttgctgagtgctaggtcatgcgataggccaatccggagtattttgtcacggcggttcttgacattggcgcgcagcacctcctcaggctccatcaaaccttcatgcttctccgcgtcaatcaaaacgaggacggtgtactcgtctgcctcaaggtctagctccacgctgatagacctgctcatgccgtggcccgaagcctgacatcgaacgatgtagtcctcttcgccagccttgtggacacggaacccaagcaggaattcataccggccctccaagcctcggaaataccgttcatcaagctgcgccaggacaagaacgactggccccgatctctccaaagtgaaggcgaacttggtgtggtggtattgcggcgaccacggaacatcgagcgtcgtccagatcgaggtgatcttccaatcaggcccaaacaacctcgtacgttcgaatcgctgatacttacgcagcagatccttgtacgacatccaaaatgagccgtcatcaccgaacttgtggttcagcttggtcaaccactcgggagtccattccttactgccgtcactccatgctcctcgccattcacccttgccccacggatttttcaacatgaccagacgcacgccatcaatctcgacggccttcatgatggagtaagcgtgcctctcgacgatgcctcttctgttcccataaccgcacgccatgtgaccggtcgaacatccaaacaagaagtcttggttgaccttcatcagctcgttcttccagaaagcatccttatccaggatatcggtggtattcaactcggaagtcacaccgccggtcaaatcctcgataccctcggccgtgaaaccgccatcgatggcttgataatcgccatgtgctttggcatatgccttctccagcaacgggagccaggtctcgttcagattctcacactgcgcaaaatacagggcgacacttccagattgaaagtttcgccggaagatttcctcggggtcggggcggttttcgatgtcatcccatattcgacgttcgacgttgatcaagccatctacgacttgctcatcgtagtcttgcttgatcaagtacagctggaaatatcgtcagtattgtatcccgatccaaatgcgagggaggcaactaaccttgtcgtcgatgatttcgctgaaccactcgccatcacggttgaagacaaaaccgtatacaccgaaattttcatcacgagcgacgcagacccgctcgatcaagcccggcttgttgctaagagtacagatggctgcgagaagccagcagtcaccatctcgcccttgacgaacatcgtctgccgtgggtcccttgatgaaaaactgggggtcttcaaagatatctcccactcgtttgacagaccgggggcagagcttagacatctcggccctcacctcagcggacttctttcggctacctttctgatagccagtctgacctccgcgcacaggatcgctctcgtcaactgaatcgatctctttctcggcctcttcttcaccaccctccctattcctttttgtcttctttcccaacgctctcgcgcgctgccgtcctctggggttccactctgggggctgcctcggatgtctaggctgatcgtcgtcactgttgtcatactctgggtagtcatccttgtagttgctcaaactctccagacagtccctcgttctcgtcttgaggtcccactccctatgtaacttggtaagtaatcgacgtcatgggaagcaatgtgggaactggaacctacaagtcgaaatgcggatcgcgatacttctggttcaccctcttgcactctttgacaatcttgtcaactttagctcgacaaagagccgccgcctcctcgtacgaggtgcttgtcgctcttccaccaccaccaccgttggcgaggtctttggcggcggtacgtttggcaagcttctcggcgtattcattcttgggaataatatttgttactttggtagcaatcagcggcttgttatacaagatgggttgttctgcagttggatacaaccgtgggctgaactccctgaagaggggagatggacaatgatcaagggcataccttttcctggattgtcactggtgaatctcttccagaagtcgtcgacattttgctggggaccgtatctgccacgacggccgctctgcttgatgaagccagggggcggaaggactatgggcttgacgccatagggctgatcggggcctcctcgccgggacatgattgttgttttcctgttcaccttccgattgttgctttgatatacttttatgtgctgacttgcttttgaataggaattaagaacaaacaaatatgagatctgtgggaaggagtgtttatcaggagcactttggaagaagcagatcaacaaggccacacgctcctcgcggagccctcctcgatgtgatgaagggaatgaaacacaaaagaatacgctggagcaaagaggatggttcaggacgaggctacgagcaacaagagatgggtttatataggagggtttcgggccttggtgcggctgcaaaacgaactgtgccatccatctgcagcattgttaagccaggtggtgcaaggttcagcaacagggttcttggaaggcaagagagactaagtgtgcaattcccgccgtaacacaacatatggttggcgcgccggtacgtcaatcataccatttggtagttgattgtatcctatcaaccaccccagacgcagcaatttgttcagagctaactgcatcccatttagcggggaatttggaggggcaagatgggggggagggggagaatcaagggggagccaagagggaggattgggacggcaggggaagaaccatgcagttagttcggtttgttagcattggctactaattagtccgaggctgcgttgtactaggcattttacttgttttgtattgagcctcatcttgcaaggggttttcgatacgtgggatccatgtcggttgtagagatgcggacagagacaggaacatgacctcgccgtgcaggtacagaatgcaccttgaagatcgaacggagtctgggaccagcgactatcctctgtgtgcagggcggattactgcaagtcaagtctgaaaaagtgcccactttctcggatgaagatattgtgtttttttagtcttatgtgagtcctgcagttggctgtcggatagggagcagtgtgctcacacctgagatcgatatctgttgtgacacttgcgatttttgcggcgttgagacttttgtgagatagagggagttgatgatgtgggaatacaaaagtgggtggttgatggggtttaagggcgatggggatgtgtatgacactgtcgtgtaagcctgagtctggattaggctagtcaaagtttggtgccgttgcatgatttgggccggcggttgtgactttgagaatggtgatgtggtatggcacaagggggtaggtaagggggtgattggctgtttggtttacatatgatcgggggtataattggtagaatagagagtaattgcgttgtattcctgggttgggttggacgacaaggcaggcaggcaggtacgttgagcatgtgggttagggcagtcagtgctgcccgagattgtgagttggatgatgatggatatgaaggttaggtgatacaacatggtggcagggtgttggaatgatgtgttcagggcggcggctgctaacgttgacacgaactctggatggggtataggtttaggtggtatgatacggcgagcgggtggtgttgtttggggcagtgctgaagttggtgaaattttgggtctttgggtggctacctatctcactggtgatttgagggtaaatgattgaaggggtggtgtttgaatgaatggagacgatgagttcaaagtgatacgcgaaggtatgtgtacagggcagtgccaacatcgttctcacttgcatccgggaggccatattgcagactagagacaaaatgggacttccattcctaaagccttggttttgtcgcggtgaattgaatggatgagaatgttcgataccggcctaaggctgagagcggctgtgctgacgaaggcgcagacctggaggagcgggagactaaaatgacgggatggcgctgccacagccacctccactgctccatcgaagccggggagattgacgatttggagaaaagagccgccgtgtagttcagacgacgtttgggtaaccgctctccctcgtcctcgatggtggtggttattttttgcgccgctgcccagcattcaaccaaccacttcaactcgattgagatcggaccaccctcccatcactttccatcgataccaacgaacctgctcaagtctcacaccaccggaagaaggcgttctccaactgttgttaccctcactgttgtaccacccccacccctcaaaatgctcatttattttccttctcagacctcgatcctcgaaaccctacaaggatggcctgggtatcgtatccatgtttcgatctaatggtaaccttgctgcgatcttcgagagcttccaaggtctcacactcagccttgcacaacacaacaccagacaacaaaagcgtgacgtagaatgaataataatgccccccaaccatccaaaaacatctctctcagttttattccccccattacagtgtgtaaaatatccccatccatacaatgatatctctctcctttcttatgacttatcaccacccgcccccccccccccccccatcccatatatgtactctttcaactatgctccatgcccatatcttcctacagaataaatatcaatacaatcaagcttccccgcacatttccccccagtcatccatctcagcaaaaattcgatatcaacctccctattatgtacaaagaacacccaaccatgacaaacccctctcctgctcacaagattaccgccccctggcactcaaccccgaaaacgcatccgggctatgccggccattagtccactccaacccaacagccatcatgctctccctgctgacattgtgcagctttggctcttgctgaggagcagcagcagctgctgctggtgctgccgcaccgcccatgctcatcacaaacgggttcttgctgcccgtcgccgcgggactaacgggcgtgggcactgcctgctgttgctggggctgctgagacggtgggtaaagcgagttgggtgtttggactggtgtggcctgtgctatgtcctgaggagctccatatgggtttgccgatacctggggctgttggccgtagagagccaggatggaggccttgtctggtctttgctgttgcacgggcatttgctgctgatatgtaagttgctgctgctgctgttgtggttggtgctgggcgaagtaaccggtcacttggggcgggagacccatctgttgtggtacttgttgctggggtacttgcaacatgggtgagagctgtccgtactgctgctgctgctgctgctgctgctgttgtggttgctgcagagcgttgggttgttgagagaagaagggattcgactgctgcagttgctgttgaggctgggtcgcgtagaaattttgctgcgtctgttcgggaatctgactgagcattggtgactggagacgggttggtgacttggtaaaggggttgttcccgtagttcccgttgaaaccagtagtattgacagacaatggctgctgttgaggctgctggttctggaaaaagggattgtatccggttgactggggttgcagaggttgcggctggggatatgtttggctaccatacactcccacctggccataaggctgctccccaggcgataccataccaatgaaaggacccccaagtggagccgtcatcggctgctgttgatagatcgcttgggtctgctgtacctgttgctgctgctgttgaggaagtagaccgcctgtatgattcgggaataatggctgctgaggaggagctagtgataagttctggaaagccaaatcgaaagctgatggtgctggttgagcctgctggggagcaccgaaaggattcgtcggtagatacggattcttgttctgcaaagtccctgttgattgcgaagacaaaggctgtggtggcggcggcgtgtcgagcatgtcgaacgggtttgtacttgctggactgatcggacgtgccgaagttggtgttcctgtcgtcaaattcctgcccaatggcatcgatgacgtccgtactggctgcaacaggcctccgggtgctcttccactgccctctcctaaccgtaccaaggcctcaatcgctttctccaagtttccacccacgcccttcaaaaccatcgcattcctgctttcatccgtgaaacccatatcccggagtttggtcaacttttgctccgtatcctccaccttgtccggttcagccgaaaagcttacgccaaacacagcagaccccttgtttcgaagtggagggtgagatcggtcatcacgaggactagtcggttcgcggcctggactcgacttcttcttggagcccagtggaaatatcgacgaggcagaacggaggccaaatcggcttggggtctttggtgggagcggaggaggggtatcttcactgctgccggtgtggtgcttcttggccgcggccaaggtccgattcatgtactttgagcggatatatcgctccataacgctgtcggcctcttcgacgtcgacggggatggaaggcttcttgttgtcggggttgtagatcttgttcgaaacaacattgccgaccttcttcatgttctacacaggaatattagcctcggcgcggaagggcgggggcactggggggggctattatcgtggcctggccttacatcgacttgttcgttggtccaactgtccatgcttagcgacttgaccttggacacgtgtgtccccatcttgcggtgcagggtagcgcaccgcatgcacaaaaagatgcccaactgccccatgattgtcagttacagtgccatcgtcgcgggtgaaattacagagggtcgcgtgggggaggcgggcgagcccgattcggtcctaacatacactccatgatgcccaagctatagcggaagcgcgtgtgatcagtccaaggtactacacagatcgtcagaggaaaaaaaggaggccaatttacatggattccgggctgaacaatcggcgcaaaagttgttgccgggaacggtctgaacaagctcttgcaagactttctcattgcgcgccgcctggcgcttgctcatggctcccgacatgtcgtcgcgtgcccgatgcgcgttggagttggttttgacaggatggtggcttcacgccgagaaagtttaaagaaaacaagaaccaaagtcaggtaggcgtggtaaactttgggtgtcctttgtgtgtgtcgggcggaacttggaggtcgggagaagacttggaccgctaaagaaagtccaaccacagcgcgcgcgcaacgacctctctgcccagcctggcccgtggtgctccaacaggggtgttcgccgtaggggaagatcactgtgcataaaccgagatcaatgacaaataaacccgaagctcctttcttgtgttcactacttattggccgccttacggagaccacacccgaccttcctacggaatatctacacaatccttccgggcaacaaaattgtcatcttttacttttcctcttctcctgaaggcggcagaagtccaaccgcgctagcgcttgacggcaacgaggggttaccaaacggggggctcccgcgctcggatgcccgggggatggtgtcgcacaaccctggaatggaggcgtgccacccacgcgaagccaagaggaaatttgtaggtcatctgcatgggttctttttacccgttcatcaaaggggaagatcgcgtgcgttttgcaagcgttccgtggtgttgggtcgggtgggaaacactgggtaaccggcactgttgcccagaagcccggttattcctctcagcacccagccccgctagggccctcgagctcagggggcctggaccagccccttttttcgagaagggtgtcattgcatatcgagaatttggccgacagtgacggcacagtttggtagtgatcatgtcttaaacctttgaagacatcaggttttggtagcaacagaccaagtccagagctgagttttcgatattccactaaactcatcgtgctgctctaatctgtattttcaaagtcttcctcgtgcgggataagaccatccagccctttgaagaaaagaccaaaacaaacaacgcccagatcgcgaaccacaactccaaaacgccccctattcccctcccaccacccaaccatcacctcctcaaaacctccccaacaccccctcaaccccctccatctcctcatccccatccacatcatccccccgcctcttcaacccaaccacccgtcccccgaccctcacaagcaacatcctcatcctctccaactcctgttccacctctccattcctccccaccaaattctcctgcacacactcccccgccccctcaaaaggctccaacagcttcctcaaccccctcaacctccccacccgcccctcaacctccttcctctccccctccaacctcttcaatctcccaaccagctcctcatacctccccctctcctcctcgtcctccccatcatcacccccccatctatccgccaacctttcaatcacccccccctccgctattcattatcagcacccactcctttccctcatcattttgttttttgtataggtacgtacctaaatcctccccctccctcaccccttccccctcccccccatccccctccaactccagactttcgtaagaagacgagatataaagcgcctcaatctgctcagcaacatgcctcgtcgcctgtggcgcatacacccgtttgcagtgctgcagcaccctgttattcagcttcgccatcacgtcattcacagccttgtccggtaactcctcgtttgtcgtctgccaggcgcgggacggatgcaacgggttcgacaacgcgcgggtttgagcactcaaaaagttggttttgagggatatgattgttggcggggcggtgtgtgacatcttgtccgctacctacgacggaaaaataaaaccagagaagaagagtagatgtgactcgggggtgattttgtcggtgagttgtaagttggaagttgagcaagtcgtgtaagttgactgttgtgagtgaaaaggcgaccaatgagatgaatggatgggtgggttggtgttgttggatcagaaggaagggttagggttgaactcgagcttcacaaaccatgaacttcaagacatcttggacttcacaacatcaccacactgcgaagcagattggccaaccaacgctctctatcattcccagtaaaatgccaaagcatgcagctttgatcatatggtataatcgcttcatcgccacggacatacaccgcagcaagacgtatgacgactcggatcagagccttcccaaatgcaaacctcacatgcttcatccctcttaccggcccacagaaccccaaaatttgatgctccctcttcgtctcctctcaagtctccctatccacagaatatctgccggcatccccaaaagtccacatcaacatgtcggcaatatcacccgccaaccttctcatctcttggtccaatcctccatgttgaggcaggtcagtgttcccaaacagctcgatccactggggcaccataacattcactcgagcctttctctcgtccatactgggttccccatgtattctgcaggccatggtaataaagtcggatatggttggtggatagacacgcgacctcctcactagatccgtaatcttgttctcgcaagcctgtgcccgctctaacaagctgggtacctcgtccatagagtccttgagaagtttgatgacctgaacacgctgagcttgagcttcgatgtgttccttgtagacactgtggtgctggttagcttctgtgatcattgcttatcgaagaggggtggagacgcactgttggcagcaagagactgtatagccaagaataatgactgggatggcccagtatgtttgcagtagtgtacagctcacgaactatttgctatgttagtggtgtatcctgaagtggccaggaagttagtggaaacactcaccgtcagaaggaacagtaggatgccgttgtacaggaaacgacggttgaactggttgcatgccgcgacataaacggaccaagtcgtagccaaatcaccgagtccaattctgggcctcacccgtggccctccctcaagcttgctgctgagttcccgcaaagtgttgccccacttgtgcgcctgtttacggagttggatggcgctcctcaggtgctggacaagcctagtccttgagatcaagtcgaactcgatctggaggtcctctgcgtcgtggtcgaagttgccctcgcatcggctggatacgctaagcgcatgtataatatcgtcgcaaagaacaaagatgctgatgacgtcgtcgtggcccggccgatagaagatgtcgtggagggatgccagatcagcgtgccaacaggacagctcattctcgacaatacgtggcacgtcttccaacttgggcacgtcttccaacttgggcacgtcttccaacttgggcccgtcttccaacttgggcccgtcttccaacttgggcccgtcttccaacttggggaatggcatggttcgtcttcgagtaaaaaggaagctgatggattcaagaaatgtccgcagcagactcatgatgtcgactgtttctcggttcgattggggagaaaatgagagatgataagaagtaagtgtatcagtaagtgtatcagtaagtgtatcagtaagtgttggaagtgaagagaagaaagaaataagtgatccaggaaagaaaaccgcctgatatacttggaaaagaccaagtgttcaaattttgcgttggtgggcaaaaacgtcatgttgcccagtggcgctttcaacctttccatgcaaaatacggttgtgccaaatgacaacctctggggaaggcatgatagccatggaggaaggcatgcctgatgacctgggagcaccatggatgacaggaaggcatcgtcggcgaccgcccaatgtcctaggctgcaccctattaataaaggggtcagtcatgcttgaccaaagtcaacaaatagatcagacactggacaaggggcatccaattgctgcgagatgaagtgtccatgagtccatgacagttcgcccgttggaggaggggccaccgaacgtcaagcttcggcaaatcatcggacccgaccgctgattgcagctttggttgcaggggagagcacctgagcgcgccaagcactgccgccacagcaagcagacctaagcaaattgagcgtcatcattcaagtggtgctctggcgaaaaaagcttgggaaagagaagctcccgtcgatatccgtctccccgcccgccattgcgacggcaaaaggacgacaacacaaccaaacatgtgcacggctgcctcggtctagttttccttttccatctcccaacatgcggtcgcagttgactcgcaatgcccaccgtcgactgctggccggcggccctggcgcccctccatgtcccgcttctgtgctctcgagctatcacgcccgcgctcgatgtctcgctgcctcgacaccttcgttgacactcacgacaccacctcgaagaaccttctttggcgtgttcaagaagcctgcccgcgaactcaaagctcccgacgtcccgcccggctatgaaaccttgctccagttcagggccctcgaggtcgaagatgcccgcccacccgaaagagaaggcttggtcaccggcttcaaggagtttttcaaccatatgaggaagcgcggaggagcagcaaaaataggccgccgtatcagtgttcctgggtccataaactcgacccaggcctttctagccgtgcggctgttgcgccatcttttatccaccgaaggcggaggtgactcttttacgtttgcagatcttaagctcatactcgagattgctgtgcggccgccgagaggaaaagcggataaccacctcgagttggtgaggttggtgtatggagaaacgaagcggaggatagaccatatgcggaccatcgggctgagcgaggaggagatcacgcaggcgattggcatctcggacagagatcaaagcacgttctttgcctatttcattaccgcccttacgaggttcggggcatcgcaggaggctgtggagaggatgaacgactaccaggagaacctcccaaagccgtcgcgggtaggggcctatactgatgatggctttaaggttattcagaaagcaaacgggatgtggatgcgggtcctgcgagggcttgctaacgaaggtttggaagatgaactgattcgatcattcagcaaactggtcaaggaaaacggcgtcaagtacttggctggcgttcacgagatcttgacgacattctacgccgagcgcaacagagttgaagaaacaaagaaatggtttagcaagccactgtttgctgggagcatcaaccctgaaacatacatggcggtggtacgatttgcgctacgaaacaacgagcaagagtggctagaatcggtcatcgaaggtgtagtcaactccaagccagcaaagcaggtctgggacgttgtatttcaatgggccgtcttggccaaggggaagggcgtggaagatatcaagggcatgttcaaggttatgggatcacaaaagactgaagaccccagcaggaagctcgaaccagatggcgacacaatcaactctcttatcagcgccgctgccgagatcaacaacccctacctggcggaaaggtttgccatgctcggaagagagctccgaataccaccgacaatccagacaatgcttatacagctagattaccgactagacgctggtgacatgagcggcgcagcggaggtgtatggcaagcttcagaaagtcgtccaaggcgacgaggacgttccggtggtcaacaagtatctccgcaccctttgcgcctcttcacagccaccgctggagaggattatcagcgtcactgccgacctggagcaccgacatatcacgctcgaaccggaaactaccagatccctctgcggtgtctttttgcggtttgaccaacagtttgaagtcatcgataccctatcacttcacacggtatcttactctctcgaagagcgcgccatagtccgccaggcgatgatggactacatcaccgaccgcaaaatcagcacggcccgcgtctgggactgctaccaattactgaaacagttcttcccggaaacctcgaccgaggagcgcgtccggctcatggactcgttctttgaccgcaagagaccagatatggcgtgttacatctttggacacatgcgcggacacgggaacccagcccagagaccaaactcggacatttacgtcaagtgctttgagggtatcgggcggttcccagatgcggagtcgctgaggatggtgcacaacatgctcaagatggacacgacggtggagatgaacaccaagttgtacaatgggctgatgctggcttacgcggcgtgcggggacccgattgatgcgttgggtttctggagggatatcacgaatagcagggaggggccgagctataactcgttggcgattgtgatgtgggcttgcgagctggcgccgaggggggaggagacggcgagggagatttggaagaagatggtgaggatggatttggagattccaaaggtggtgtttgatgggtatttgggggcgttggcggcgagcgggaaggcgcaggatgaggtgaagaagttgattggggagatggagagggggttggggttggggtatggggttggggtagagacgtaggttttttttttgtcctctattatggtgaagtgatttatactgaccaattttaggctgggggtaacattcaatgccatcccgacaatggaagggaagaacgcgtttgctgattgggcaaaggtggaacaccccgaggtatggggtgagctggagaagacggggaggagggagacgattgatgggccaaagtacaatattgagaggaggtttgaagcttgaagagtgtgggtggattatttaaacgacatgaactaaaagtcatttcggggtattttggtggccagggggtggtggttggggtttaaaatgcaaaaaaatgtttgtgtgtgtgtctgtgtatagaaaagcgaattgtatttcaaactgttgtaacttttgtacatatacaaatatatgaaaccacttggaaaggttggggtgtgggatttacacaatccaggttgagatggttattgtgctgttacaagttcttcactcgaggctgtccggtttacctcaggggtggttgatgacaaaatgtagcccatttgtattgatacagttcatttgaataatatacaccgacaccgtcttcctgttcccctcatgttgcaattttactagaaattcatggcagtgttgatcctccccctcatcttcatgacttcggggtgtctgtggacggatgggtggatgccgagaccgatggccctcctgatggccttggccatcttgcgctggttgacgggacggaggccggtgtccttggagtgcatgattctgcccaagggggtcatgaattcggagatcatggagaaattctgttttgtctgtgttagcaactgaacccattttctttcagctactctgccctccttttctctctgccacaacttccctcctcctcccctttcaccatcagattcgtctaatgtctttctttccatgatttccatcattcctgcctgcccctgatatacaacccactttcatctttgagcaaggaaaccggactgcaagacctaccctgtaattatccagcgggttcacccccaacatgtcaatcacatccctctttgggctcttgacgaccttccactttttggcctcggccgggctcaggtcgtggggggcgtagacgtcgccttcgcgccagcggcgggggtgtttgcggaggtacatgtcggcgcggtgctggtgcttgacgacatcctcggcggcttcgaagccgtagttggtgtggccggtgggggagggggcggagggttgttccggggcgaagagggaggcgaggattgaggttggggagggggttgctgttgggggtttggttgaagctggcgagcgggtgaggagggcgggggagggggtgggttgggaggagtagaatcttgctgttggccggaggagggctagggggcggaaggttttggtggacatggttgctgatgggcagggtgagtgtgggcggcgctgacggggaggtatcgtcaagcgaccttcaacggtgcagttcgcgatagtttttggtgggttattgattttgaggcttggaatgccgtgattggttggaattgcaaagcttaatgtggggaggtgggtggttcttggcgtgagacaggggttgcggcaggcagatgtgggggggcgataaggctctctctccaaaatttctgggttgcaggatgccatcaaggtgctgttgttttgctggtgaatttaatcagtgacaaacttgcgacaaacaacaaaagacgaaactatcgactttttgatcggcgacaaatcggagagcagcaaggatggtcaggaaactcaagtttcatgagcagaagctcttgaagaagtgggtggtgatggaatgatcgagaaagggagaaaggctaatgtgggatgcgcaggcatgactttgtcaattacaagcaggataacaagcatcgggatcatgatgtttcgaggtatggattctgtactgtggtttttgatgaattggggctaatggttggtaggcggtatatgattcagaagccggaggattatgtatgttttgatggcatcgaggatctgactgtttcgttgcatctggaccattactgaccttttcaaagcacaaatacaacaagatttgtggctctcttcgacaattggcccaccgtcttagtgtaagtttggtctccgaatgagtggactcttgaaaaccagcatgctaatcctcgatagttgcttccaccagataacgaggtcagaagaaaacacgagacccttcttctggacaagctctatgacatgggcattctttcggtgtgtgaccccattccatgataaagcaaatgcccatactgactggtgattccagaccaagtcaaagctgtctaatgtcgagcacaaagtcacagtctcagcccttgccagacggcggttaccagtcgtcatgaccagattacgcatggccgagaccgtccaggctgctaccaagatggtggagcagggccatgtccgtgttggtgttgagcaaatccaagatcccagctttctggtgacgagaagcatggaggacttcgtcacctggaccgctgacagcaagatcaagcggaacatcatgaagtaccgcgacaagctcgatgattatgatctgctctagagggttaaggtacgggtagattcgctaggagcatttgcatttttggcgttattatgggcggatgataaacttgggcgttgacaagagtttgccagtttggctttaattatcttgtgagacaatccgatttgatttgatgtttgtgctgattcaatgggttggcctaggtccctgaagcgtaccttccatgctaacaccaggcctccttcccctgattgacctgccttcggggcccatggcaagattgttcggcgctctttccatttatcagatattttgtgggagtgtttgccacgcaagtgttcgatgacggcagaccaacattcaatccccttgctctacacttcttccaattccattcatcttcacccccgtttagtcttcattgcatcgtctttcgttcatgtcctaattcctatacgttatcttcatctcctcctccgacgtggacagaggctatccaaacaaccaaccaaccaccaaccattcctacacccttcgctggtccagaagcctcgaggccatcgcctcctgtcccttgttcatcagactctctccctcaagttcattccgacttcaccacaatgaatgccaaccacccgccagagctccgcactgggctgcaaatgagcacaaccggaccagacgtacctcctagtcctgagtcttgttgcttcactaccgcaccagttggcttgccagatttcggtgagggtgtctcgaccgtgccttcatcgagcaaggcataccaggatgctctgcagaacctgtcggccagccatcctccctggcttgacaaagccgctcctctgtcttactttacgcccgggcttgttgggtcccgtgaaggctctccgagaagcttcctgtcacatccaccggtacagaagcctctaccagtcgttccggaaacaagacggaaacctgatccagaagctggtcattctggtggtggaattcaaggcaggatatgcatcgatccccgaatgcatccgacgaaggcccacgcgaaacttcatcatccaggattgctgaaaggagccgatttttgtgatgccggggttgaatgcgctcctatcgagccaatcgagtcacctgaaaaagacaaacgcttgtttccgttcggcgatttctttgatgattcttcagacgaagaaggccccgtcgtcggctaccgcttccgcagactcactggtggtgacatttgcagagaaagagtagacgtctccaaccacaaacactctggtcacagctcagccctcaaagtacggcctgctctgggtgtcacggcattcaatctttccgatcacgaacaacgtcagccgtatcatggggtgtcaaaggtccgcacactagctgatattccccccatcaaacttcttaatccgccactggaaataccgttgcgggacagcagcttggcagaccctggccaagtttgtgatgacctcgcacccgagcagacagaagcccgttccgattcatcccggccctccagcgaatattcatcgcgctctagttcccggcatataggcgatatgttgctctatggggaagggccgccattccatcaacgtgcagattccgcccagtccatgatctcggacgggactgtattcagtccatttgaatcgggtcaacctgctgtaggagaaatctttcatcaagaccgcagtcctatcctggacgagacagctgtgctgagcgatgctgaaccggctaacgcacctgaagagacgttgtgggccaacggcaggtcattcagtcagaatgaggatccgatactacgtccattagagtgtgggtttcccactgtccatccatgctcttgtgttgtgccgaaggtccagccgtctactgaagatcttctgggtgttgggctccgtcccttggtcgagtctccaagaaccaagtcaagtgcggagagaagaacaaggaatcgtcgagcagaaacggcgcccgagttggctgcatactaggaatcaacgtctgaggtagccaggggctcggatgtagagttgtcaactgcaagcaagaaggttggcgagctccatattcgtcatgatactgggcattctactaacacctctcaggcatcttctgttgatcctcgccgtgcgactacgaccaccgtttcgtcaaactcgggggatggtcctcgctcaaccggaataacaaccccaagaaatttggacctcagtcgtctggcctcgttcttccgtgacctcaccaagccgtatgagacgtaccagtccaagttgactgaattacccgcaagggaaaatacggtagagtctgttgcgggcaatcagccaacgtctcccgtctcgggaaggatcaggaacctcactggtaattccaccgcgtcaacatccttggatacgcggttcaagcgcactgtgtgcaacatggaacaactgctcaacaaagccatggatttggcaaatcaagctgttgaccaagatgaccaccaatgtctcgatatgcttggaacagtggaccatgaagcagactctcacaactctccaccaagtgtgcacgagagcctacctagcgtctacgagtcgagtgacgatgaacagccgcctcctcctcctcctcctcctcctcctcctgttcacaaaagaacgatcgagaaggttgctacgccacgttcttcgatcaagcagcctcctcatgtccccaaacatcataggtcagctcctggtatgcgcagtaggaacgtcagaatcgagattcccaagagggtcacgagcctcaggaagcttaacgctggtatggtgcatgccccactatcagaccttcaacggagtcgatttcaggagttgtcgcccccagtgagcccgctcacgcacgccccttccagaccagacgatcacggccagacagattctctatctgaacaaggctgcattttgatgagtagagggtccaagaaggtcaagaagtgtcgcagttgccgccgtcttcctttgctcaaccatcgcttcagcttcttgtgtgcaaaggaagaggatgttcctcttaaggatactcgttcaagacctgatgccaagctgcgacccgccggaaagtcaatttcgggaaagatacgaaaatcaaactcttggagcttcgatggtgctgttgaccatcgtcctgatgattcaatggaggacagtctgctccatgagacggatggagctgggccgtcggccgagagatcatatccggtcaaagatgatcactttgagcaagatgatcctcaccccgagaatggtaccgacagcagacgcatcaaccttcgtggcaaggcacacgtcagtctcagaggctatcagggcttcagcctcgctcgtgcatatcgacgccatcccattgctcgcgactggtctacggtccggaaacgttttgtggcgacggttgcatgcctgagtacggctgtcattggtgttcttatcggcatctatgctggtatggtgccttcgatacagtacatgattgctgacctgcaacactacgccattctcggcaatgttttcttctacattggtctcgccatccccagcttcttcttctggccgttacctcttcttcatggccggaagccctacatcctgtcgagtttggtcttggctatgcctctcctctttccccaagccatcacggttagccagcctcggtcaccctatgtcagcacctggagatgggctctgttgagttctcgtgccttcatgggccttaccctgggctttgctagcatgaactttcactccgtattgactgatctgtttggggcttcgttgatgagcggcaacccgcaccaagagattgttgacaagcatgacgtgcgaagacacggaggaggtatgggtgcttggttggggctctggacatggtgctacactggctctcttggaattgggttcttgcttggggccgtcatcattgacagcgcaaacccatcatggggattctacgtcagcatcatcctcatcatgttcatccttcttttgaatgttgtctgtcccgaagtccgacgctccccgttcaggagatccgtggctgaggtcagaaacggcaaccgggtttcgagaagggtggcccgaggggaggtcatgatgcatcgtgtcaaggatggtcctacatggtgggggcaagaggtgtaccatggcatcttgttgtcgctggagatgcttcggcagcctggctttctcatcattgcgctctacacgggatggatctacgcccaggtcgtcctaatcattgttctcctgggtgccttgacgtcgaggtcataccagttgaggtcaccgtttgttggtctctgtgtcgctttcatttcgttcggtgctttggtggccatcccgttccaaaaggcgaacttattttctcggggtcgccaccaccagcaacagtcaaatgaggatacattcgacaagaagttctcatggacgtctcacctgctgaggcggacaattgtttgcttggtgttgcctcttgtgggagtcgcctacacatttgcctcgaccggccctccggttcctcttgaaatccctacactattcgctacgatgattggtttgctctcgggtctcgccatctcagaatgcaacggcttgatcatggagacatttgacacttcggatcttcacccgggaatgactggccggccgcgtggtgcctccaacaagtcatccaaacgcaccaactactcgtcttttccctgcgtcacagccgggtttgcagtttgccacacgattgggtttgtcctggcagctgtggctacggcagtgggaggtaatctgcagcgaaacctcggtcagcaagctgcaactggtgtcgttgccggtattctgttaatcctgacgctccttctcctcgcggttctcattcgcttcaaagatgtgcaaatcattcccgtttccaagaatctcgagatggaaaagtgggagaagtaccgcagagagagcatccgccgtcgctctgaagtgtccgcacctgccacacaaaacaccatgaccgacgcagagatgtggcggcctcttctcatgggcaatccctctagccgcatgcgccgtgtcaacattcttgagctggggtccatgagtcggtggacagagattcgcaagaagaaccgtctgattgatgagacgtcagctcatctcaaccgtgctgctctcgagtcggcagctacggcccttgaggagacaaccactgatcttgtccgtcgtgtcagcagccggaggaacaaccggagccctccgccacggaggtttttcactggcagccctggcccttcgggggtagcgagaagtgagagtcccatacagcgggctgtgatgacgccaaaggctatggagcttgattcctttattgtggtcagacaaccacctgttgctgctactgctgttccggcgagtccatcgccacttccgggccattccaagacgagaggcgccggtgatgactttatggagcgggagtgtgtcatggggcagacggtgaaggaggaagaaaatgagaatggggatggggcgctgtttgagtcgagtgattttttgagttcgtcggatgaccagaaggatgttgttgggcgtggtcgtgcggagatcaaggacaagtttgatgatgcgggacatcaaggtcatggtcatcagagtcattttcaggaggaggagagcgaggggaggaggaatgggaatgagattcaaaggaagtgaagactgccagaagggggtagagattttgtgattttatggccctagattaggtacctctataagtcatgctcacactttcacgttttgtttgggagttgaagaacctgttgcctggccatgaagtgtgctcgtcaggttgctccttcccttcagagctgttgtggctgctgctggtccattcatgctcacctaacgtggaaagaggaaggagcgaaccagtggtttatatattaggtcaaccatgtactttccaacagcagctctgataatccagccagggcgccacttatgtggtcaggacaaatggtcagattggaggagctgctgttaccgccccccggtccccccgccgggagtttgcaactgatagcttccgagttcgattccgaagtaaacccactgagggtttcgtagccggccaccctcaagggttggccggtgagcttttgctttaattttttttggcgatttctttgcgatttcatttatttattgttgttgttgtgtagttgcctaggtgggtggatacctatcacatggaatgggacgatgagacttgctttgtgtgtatggtggaaggtttgagaaggggtttgtttactttgtgatgagggtattttgagagaagagcgaaggtcttgtgatccctccatctcttttattgctctgtttgattgagcagtccatccatctgccttttgatctggtccgtgacagggctaaccttttgctcttgaacaatttcatagtaggtggtagccctttgtttacatagctactcctaaccgtggtctgtggtaaggttttgttggtttgggaaaccaccacgtaagcttgtggttcaaacaacgtttcatgtattcattcagagcctgccgtcatctccaaggatagacagatgggccatgatatcacccttccttttcacttggtacgtttcaacacacactgtgtagagctagttcgccaaatgtaccttctagtcactacacgctgagtaagagagagggattcagacgccagagttgaacagcatgaagctaacatctgctcacacatgacaaattggccatgtgtaaacagccaaaacgctcattcgttcatctcgagcaagcaagcaagcgagctggttcagggagctaggtatagtacaccgcatctttggtcttggtctcgtcttggtcctaggtttggttggttgtctttgttcttcccttctttctccatgcggtgtgtcgtgtctggtatgccatgccatgcctctagggtcctcatgatcgagtccaaacgatcggaaggggtccaacgtccgttcacgcccatgtgttgttgcgtctgctgtgtcccccctttttctttccaacccctgaagttgtcgtcagcttgcattcagcgatttctttcagggtccaagttatttttttttcccaccctctggccgggctggcctggttggacttgagagttcgatcgatctggaattttaggcagggtccctcacatcaagtgggcatgtcgtcattgacccttgaatttatcaaggacgacccttgggcttgacattctcatgttgagtgggagggggaaatccaggaatcccatcatcccgcccggttccactagggactggcttcccttgacttggctgattgggtgttagggatgagatctgaaccttggctgctgcaagatcaaggttatatcggtcccgttcatggggacacgaggtgcgagaaaggccacgaggagcttgtgcctgtgtatcgtgttaggtgtgatgagggtggttgactggaccctaggtgcagatgagggtggtcaggtacgactcttacacgacagtgtcaaggggttttcgagtcggtcttttggctttgaactcggcgatgagagggggagggaggggggggatccttgtgatgattttctgttgggaggcatgttgatacgtgcgattttcagggtctgagacttgcaagcggtgtcagggacaggatgggatacgacgggggagcaggccgagtggtggtggttgacgttgttgtgataatggaatgtgttgctcggcttgacaggggtcggagacgagggcgaggagggggcccgggacgtgctagatgacggttgcaaacttcccggaatgaagtcgtatataatgggcaggaacggcctcgatgctccttctccccaacggatcggacggcttggcttctgaaaggtagtattatggaaagagcgatgcttctcctgccgtcattgacagctgaggttggattctaagccatgtattactcatcagcagaggctagaaaccggaggtcccttcttgcagtcgataaggccgcacgcgagtatcacattgtgacatgcatcctgtcgtacaccttgtgaagttgtacacacacgaggccacacggtcaatcaatggcatctaaaaacgccctcgcggggattcgaaaaagtcggacccttggccttgttatggttgtagcacccccatcggagtgttctagaagatgagcagcgtggaggtttattgggtgcggttcggatctggatatctaatactgcctgaaactgttgtcagatattgcagcggcaagtcaacggctaggtaggcatgcacgaattttctacagagcttgttctacttgatcaagtctatcactggttgatcatacgtgtcaaccatccatccagaacctcataacaccatgactccctcgagtaaacatccctcacttgacaacagcagggacctacctgtcaaaactgcaccctcccgcggcccgatcttcgcatgccaaagaaatagaaacccatgttcacatttccttggtttttgtaaactttcccagtcagtccgggtctttggatccggcctctcgttccccagctcacccgccgcgcccgtcagtcaaagccgttgttttactctgacccgaaccacactggagtgcatatgtctgatccagatccagggacgcattacccgtccgcttcccagagccgatccgggcaatttgtttcaatctttgggatcgagcggctcttgggggtgcttttgagacatattatcgatttagaccgccttttagacgtcagttgtatttttctttttcttgctttcgggggatgcctcgaacttggacactcacgatacatacgacaaagacaatacaaccatttcgttcaccgacatggtagacagggcagataagccaaaacacaagagaggaccacaacagaaaagacagcttctggaccagagcagaaacaccacattagccagcagcggtgtgtttggaatcggatctgcttggctccctggaatacatgtgcatagggtccaggcaaagccaaaccgccgatacgtactctgcagctgggaccgtctcccagctttcctgcgaggagtttctggaagccttgtcagcctgcaaaggaaaggcaacccgtcgagctaacagcgtcttcccttgcgtcccatgacacgagcctgccatgctctcaccagtcgtcggacacaagcgagaccccttccaatatggcaaatgcaggtttggcttcttgctcgccgtcttccatcatgtgtcattgcgcgctgattgaaacaccctatctgatagcttgttcgtccggtcgatttggacggctgatataggccaacctaccacacagtgtatgcaggctgagccctatagccagagctgatatgtgatatccttctcccttggctcttgtctcttcctcctttcccgcaccaccaacacgggggggccaacgggcaaacagaaacaaatcgtacgccttgtcatgcgcgcgtgcagcagtagtgtcatctgaggagtcacactcccccttcacaatcgcaatcgacatctcgattcttcatcttacattattcgattttctatctcgatcttacgatttcacccgtacccgccttttcagctgagggagtttgctttcccagtgggcggctctatccctgacttggcaagctgcagattgcagatgcagctgagagtcaaactagtagctccagatcgaaaagaaagtagagaaaggaggattgggtgttctagacccgaggaattgtgttggtagaagacttctgagctttcactcaagccggagtaagcgccgtaaacatatttccaagattgcaaatgtttgatgagtgcatcatcgcctgcttggagatgatatgatgctcctggtacagtatgtggttgcatttaccccggcggcgtgttggttttggcaagcttttttcctccatcacccacacgccctccccccccccccccccaaatgcggctttttttttctcttccctcccactcaatgcatgcaaccgacaaactccatcatcccagaagttcggtcgggcagaagtggatggactcggaatgatagcctgcggctcgttgcgagcacagtgtgtatttactccacagatttcgtgccattcccattcctgcggaccaccaccactgggcagaaaccccgcacagtgcacctaccaccccacaagccagatcccgtgacgtcagttgactgactgttacggtcgagattagcgaggggaggagggagcttggcaggtagaggtacttcgttggcggggggggggggggggttattaaattctccaatcatacacctgagttgctttcacgacagcaattcgactgcgccgcagggttcagtcagccttagggggaggcgaatgatatcattgatgatggttttagatggatggtttagaagattaaaagcggggggtggaagtgattgttggctttgatatcgacagctggaccctgatctgttggccaaacgctgctctccaaccagtgcgaggggtaaccgttccagcttgcgagcaattcaaagctggaattcttgggactagtgttttaaatgccaaaacggtgttgtctgtcggactccagtttatagctaggccccgcccgcacgcactgagaagcgctctcagccttgccacagtgcgggctgaggggggtacctcgaggtacacaggtatccggccgccgcccaccagtcagccacctagatcgatttcccgtttctgagtggtgaaaaaaggggggggtaaagatctgcgacctgtcgattggagcgggcgggtcctacattatggaggttttgacggggccacgcgcgcgtgtgtggaatcgagagaacacaaaggtctgttgtgtgtttggcaggtgatcgggtaggagtccaatgagatctcgattagatatgtagaggttggattaaggcagagatgttgggattgggaggtaggttgacgatgaggttttcgtttcttaccctatgaaagaaaagtgacaacaaatcggaaagacaaaaaccttcctgccaggtgggctgacattttttttttttttcgcttggtggcagagtagtatggggtggacgagatttctctcatgttgcagctggaatgaattgtgatgatgcagctacccgtttcttgtgtgtcccaaacctacacaaccactcacaaagcgcgagccgatgattatccatccgcttcgtctctctccaaaaccaaagcccggttctcggttctccaccattatcgtttatattttttggcgttgcggccgcagctcgaggtctctctctctctctccgtttctttatcattgggtaccagaaatagttgcacaatgctgcccaaattttgcctccttttctctccctaaacccgttcccgaaccgtgtgtacacacttcccgagcatgtgtttcggcccggtaaaacgaatgggtaagcgaagtaaaatcacctgatggtctcggtccgacgtaaaggtagcttttggtttcttcttcttaaagagggggaggagagcaagcagttccacacccacaccggccggaccgcgacttgcactgactatgatgagttggcaaacaggtaaggtggacttgtcagaccgttgcacgaccttttcttttttgccttttcctctctccctcacttcctcggctgggtattcttccgcggaccggaggaggaggaggaggacgacgacgacgacgacgagggcgaaaaagagaagaaaaggctgatgatgggggaatgatctgtcagatctgggcggccgcggaaaggaggatggggaaatatcctccggtggggcgatcattctttttttcacttttctaatcggtaagcataaaaatggcatgagagaactgacaaagttgaacccggggagccggggccatgatgtgggaaaagaaggctagaaacgcctcttcccgctttgcatgatgactgcttgcgttgcgggtgtgtgatctgttctatcnnnnnnnnnnnnnnnnnnnnnnnnnnnnnnnnnnnnnnnnnnnnnnnnnnnnnnnnnnnnnnnnnnnnnnnnnnnnnnnnnnnnnnnnnnnnnnnnnnnnnnnnnnnnnnnnnnnnnnnnnnnnnnnnnnnnnnnnnnnnnnnnnnnnnngctagatgcagagtgtgtcattaaatatttctgttagataagtaattggcatagtttatggttaaaaattcgctggtatctgtttgtgtttaatcccttagcttttgttcctgattaatttaagattcatgtgcaaaaattttccaaatagttagtgatccacccccccctcccccgtttcgggatccgacatccagggtccacgatatttttttggcatatttgttcccccccatcacaagtatagcaatctatgctcggcccgctgcgtgtcttttagctctttataagcaccgagtgacaagttcagtgatcgacacttttttccttctctgggggttacggtcagcaagcctcagacagcagataactgagcatgaaatgaagatcttgatgcccaagggcgcacaagcattttttttttctatatcgatatcatttgtcagagcgagggggctatgattgatcaagtcagctacctgaacaaacaagacaagatcttcgatttctcaataggcaagagtgagagagaggggcgggggaggaagggtggatggatattggtggggaaggggcagcccgtcaatcaattaatcactcggatcgggcttgacgggaatgtgcatgagggaaagggagttgatcaaatgtattgggtggcatggtttgtgtgtatcttgactatcaactgcacatgttccttccacacccaccaccaccctattcgacaagagggtgaatattgaccaaaaggtcagatgtttgacgcctctttttcttttcttctagtggccagaatgttgcagttgaactggcgggagcagcacgactagctgattgccttgtattgttggtcattcggtttcctctctgatgttggatccatgtttgtttcgccacggtggtatttaactttcgaacagggcaacggtgggcaatagacatcaacgcacctgtcaaacctctttacctacgtgcctacctaccttgctcctacttctcaaaacttatcccaaagtgtgtattgggggaaaaagaagtagcatacaaaactgccgtgcccttccaccacaacacaacactccatacactccatcggctaaacctgccccgtttcaccaacaccatcaactcacatttccatccatccacccagccaaacaagggaccacccgcagcccacacgcagcctcctcaaacaaaaccgcaagataattcctctccccatcctagtagggattcccggcccttcctttcccgattccgaaccagcagctgtcagaaaatgtttgggcgacaggaaaactgtgtgtgtgtgcttgtatcaaaagccagccaagctcctgactttgaccatgcaactacccgtccgattttcttgcacctcttcttatacagtatgaaaaggtaaaacgccactacatgtaaaaagttgcactttctttccatgtcaaaagtatgatcaatcagtggtgttggtgtgaatccgagcctctgttgtgtgtgtattgtgtcactaaaggtgcccaaacttgccatgcctgccctcccaccataatcactctccccgaaacaccatcatgatatctcgcaagaaaaaccacaacgtcacacacacgaccaaccgaacaggtcttttcacaaaaacgacacaccacacccccaagaaaaacgtaccacacacacgcacacacnnnnnnnnnnnnnnnnnnnnnnnnnnnnnnnnnnnnnnnnnnnnnnnnnnnnnnnnnnnnnnnnnnnnnnnnnnnnnnnnnnnnnnnnnnnnnnnnnnnnnnnnnnnnnnnnnnnnnnnnnnnnnnnnnnnnnnnnnnnnnnnnnnnnnngtgctggttgttgcaaaggtgattgaatatatttccctctcccacaaggagaaaaaaaaacgtattcgggtattcggagaacatttggtgtgtgatataaaaaaacgacatggttgcagaagacggatacacgtgtttgttgcctggaaggagagaagaccaaaaaaaacaagaaaacaaaaagaaaaaagaccggtcaatactagctccggtcctcggatggcttcggcctcagcgacctctgatcaagctgcctttttcgctccagtttcgcatagtgaagaccgcaggcgttgcatagcgtcctcgccccgtcgggaccgcgcctccactctggggtgtcaatcctgttgcagctgtgacaccgtccgggaggagccgcacgctgttttgataactttgttagcttgccatgtgccatttatccggtaaccatctgtcagacaacaacaaaaaaaaaagaaagaaaaaaaaacttacgccgcgccgtttcttaacctcgttcagactgtaggctggcttcatcccgtcgttgtacatggccacatcctcgtcctcgggctttcggccgtgatcgcgcgctcgctcgtcctgaattctattccgttgaatcatttcccgcacctcctcgagcttcttgagggcaagcaggaggctgttgagaagcccgccgacctcgttctcggtgggcattctcgacaggatgggctgtgagccaccctgctcccgcgcggcagctacgtaggcctcggcaaaattgaagccagtacggcacgagttggcaacctggtataatttgttagcatctgagttttggcatcacggttcaagatgcgactcacgatttgcagagcatcttggtagccatatgtttcgtaatgcttgtccagggcggccttgtagtccgacaaccgatggtgcatatattcgctgttttcctcaccatacgcaggtggccgttgcgaatcatatggggatgagaagcctggtcctgagcttctaggggatgctgggtatgccgacagaggcaactgtccaggtggcaggcgtccggtttcagaataaagccctggcaactgctgcggcggctgctcgcgatggccagcgctgagaggcggttgttgtggctgcggtggcctgtggtccgactcagccgagtcgactttgtgtgcatgtgaaggggagtggtgtggccccgagaaagtgttcagtggtggaggtgcaggtcggctagccaaagtaggccgtgatgggtcagagaaggcagggagggtatctgatcgtgggtaacccgacgatacaggatgcagtgttcttggcgactggttcttctcgactccagcctcaaaggaccgtggcggacctgtgagcgatgcgaccgagaaaggcgctgggaggctctgaggaggcatttgttgaggcactgggggtgcaaatgacccaggctttgtccccgagatgacttcggagatggaagggagggattgccggtggttgttagcggattccggttcttcagccgaccggcgcggctcaaccggcgagatcatgccagggatgctggtgacgggagccgagtgtgggtatcccgaattatacgaagagtgatgctgatggtaacccggggcgctcgggctgatgatggtagcggtcgccatgttttgcccttctctatacgaggtatcgatgcgttggtctcgaggtcgtctatcaaaatgatccaaggggttgctgttggcagttggaattccactggagaattgagaatgttagacgcgccttggggaagggagcagcagcaatcaagcaaagaagaaaaagtcacaaacctttgcctgttacctgaatcacccgcttccatagcgggtcttgttcaactatgtgtgtatatatatccttcaagcaagcaaggcgctacggtgtgtgtttgacgtgcagattgacgggtggtgcttgtcgagtgcgcacagtcgctaccatccagctggcggtgacggtcggacttgggaccgtttttggcgtcggctctgcggctcaatcagggccggtgggcaacggtggttcagcgaacgtataagaatgctattgtcggctttccgcttttcggttccgtaggcagtccgcgggccaattcctgagaggagaggcctaatagcactcaacaagcacggggcgatgctgcaagaatcctcaaagggcacggcggcggtagattgggggggggggtggaaggcagtaggtcacaggcgtgcaaaagacggacaggaaagggaggccaggtggaggtgggcggacaggcgcggttttgtgtctttccttattttgttaggggacccggggggagggggctgctgaggctagaggactcgcagatagccagccgctcggggggagaagggggggggaaaggtaggtatgtatgtgtactgtgtgggtttggggtggattggagggaggggcgatcgagatcaggtgtgggtcaccactctcccgtggaaatggattgtgggaaacgtgctgtttccccccggacccttgtgtctcgcgccgacgtgagaccaggtacctcgaccaagcgttagcgttcccagctccgcacctcgcaagcctgggcagagaagcagccagccagccagcctacggatacagccagtcagccagctcgtccacagcacagcacagcacagcgcagctcccacagcagcaagcaccaaacagctcactcacccccctcttttcgagccgagtgagaagaggaaagcaagctgccaagcccgggctaccagattcgatgatgcctgtgccgtgttgatgtcactgtcctgccaatctggacgatcgttgcgaagaaaccgaaaaggcggaacaattcgctctcggccctggcgggctcgtgtggttggccagaaatccctctgcctggatagtgatgacgactggtcgttggaattgggaactggtgcaccgtagtcaaagcagaagagacaggaaaagagaagagaaagcgaaagcgaccgggccgctgatgggcgagggccggacgatagacagtaattattactaccttctctctctcacctcgaggtgggagcacctccaagctgcaacacgggtagatgagtctggtagtggcagtttatagcttgctgtgcgtacactaccgtgctctgtgtgcctcacacaaagtcggagaaaaagacgggaggacttgaaaaggctctccctctccccagatcgattggaaaacatgctacagtaagtactggtacttgcccaacagcgtcttatgtccgcagtctcttttgctggttgctgctgcagcatcaggcacttctggaaatgctctctacctgttcttccaagtactgtactgtacctcgcggtaccggaaacgatcgcgttcccggcatggcatggcatggcatggcttctccctctctctgatgagatttgatgaaccgatgcgcgggtcgtccagtcaggaaatgcagttggtttgagtgggggagggaagggggtgcatgggggcgccatctcatgctccacctgatgcttgggttaccactgggctggggccttgctgcgatgctggctgggattttggtcagccaggaatttggtaccccagcccgatgcggtgagggcaaaccttgtcgcctggttggccggcttcctgccgagtccactttgtccacgggtacttggcggtaccaggagatgtcgacaccccgtcaccgtaccgtgtgctctttttggcttcgaactgtgtcgtcgcttcctcctcgacagaagaaggaaaacgtcagcgcccagcaaaaaaaaaaaagcaaaaaaaaacgccagctgacaaggaaacaccccccaaggtctccaaggtgggtgcatttcgatctgcaggatccttttcgagtcacgttattagaagaacatgacagataacagtctcaaccacaatcattgtttgatcaaatggcaagttccgccgtcgtcccgagctgctgccattgtctgccgcattcaagagggcggctcacatctctatccgtatgtacacggcctctgtccccgcacacagaagatctggctatcggatcggacatcgctccccgatctgggtgccgtatcgtgccactgtgcctccaccataggtcagcttttgagcgcgtacgtaaggtagctattgtacgtgtgtactaggtggcatgttgggcagataaggaaacatccaggcagcagcaaacacgcccagcgtcatagtgtataaaagtctggttaagcttatgttacggacttatttgtcgggtcgctcagggcggcaacggaggctgcaccaacaacagctggagagcacttgtttctgtggtgggttttcggtagggaatctctgagtctgccgaggccaattcatcactatcgcacgatttcaccctggtgtttgcccggcttggcgtcacattctagaaggaaaatgtctgtgactgccccctatgctggatcgagatccctggtcttggccccctgtgtcgtgtaaatcgttgctgtaaacggcaatcccagccagaccagatggatgggacggatgagatgacgcctttgttccaatacaaccgctgtttatactatctggccagccgtctggctctgcttgaatgtgctgtcacagggcgctgtggaacagcgtcgtagctgtgagctattgaggagttatatccagtggttgctcactagtccagtcggggcactccgagcatagcagactgccgatttccccagcgatcggtaccggtatctcggcggagaatgtgcataagcagttccctgcttttcagtcggctccgtggtccgctggagggctcagcagagggaaaattgccaacggttggcagttttccagtcccggcatctgtcagagaatgccagcgcccaaggcggctggtctggcagccgctgacctgacaaactcacctgatggaggggtagtattccgacctctccatctccgcctcgacgaatgggctgtggcatcacactgctcccaggtgcactcagccatatgagctggcactctggtgcgtgatacaaacagtgcggtgttgctaccagcggctcccagagatatgccgagcgaggtgaatgaaaaggcctcatcgtggtcagaagaggcgggcccccgtccagcatgaaattccctctatcgacttctggcttttatgacgaatctccaagcgggaatagtgtcaggtatcgcatccgctccatcctctcgcccctccaaatctccgggtctcccagcgtggggccgccgcgagggtcgtgtcgtgatggattcaggaggttcgcacacgaggaatacgacgctgttccaacaccagcacgtgggctcttgctgggttgtaccacgggataccctgaggatttcgagggagcggtttgaaccgaaggattgggccacaaggggtttctcatcgatcggatctggcctggtgcccccgctgacgggcaagggtcatgagatgaaaggacacggccaatcttgagtgccacagtgcatggcgctaggctggcaggcctgcgtgctgaaaggttgcggtttgctggatttttctcgctaatcgaatggccgaatcggccgggcttgggccttgtcgagagcgtggatgggtggaatatgggcagatgggatgatggaatcagtggaaaatgcaacgcacccgaaaagtcccgccaagctcggttttgtgagcggcccaatctgttttccccgctctgcaactccacgggcagacgggttggccctatcagcattggctgattattttcctgcagaccaaagagctgtctgcgacaagaaaaaaatcgctgaaacgggcaacattcacgggtaaagtcagatgatgaacggtggatcggcttcgggggaaaaccgcgcgggaagggaaagatggcgtcgatatgttcgatatttgcatgtacggcacgtgattgtgaggtaataggtattaggtatctccccgcaatttgcaggatattcctcttcggacaagagaagctgtggcggtggtagtgtacctatgctgtctcgagaactttcggcagaatgctacctggagaagcaacagcagcatcagcagcatcatcatcaatcaacccgcaactctgggagatcgaaccaacaacagctgggaacggatatcatcattttagtacatgccgcgggaagagcgtcacctatctagtgtcgcggtccctgtctgcctgacccgctttttgttccacgcttgggcctggtggacgatggaaccgttcgtcctaaaaataccaccaacgcccgcactgtgtacctctgaagcttcccagcagtgagaggtgtacagtgtgccgatgatctcaaccgctcttgcatctgtcagaaacaggaattctgcgcccctggcattcttctctgcatctgccactcacctgtcatcactttcccttttccccatcgctgtgcctcgtcagccatcacaaaacgaacaccgagcccaggactgaccaccagtgcagtgagatgtgtgcgtgcccaaggccccacagcggggagaattggacggaacagcatccgggctcacgctcggtgacgagccttctttccctcgggagcggcggagaactttccgggctctgtgctctctgctcgtttagtttcaaaacatgctgatccgatagatccccagtgatttcttcagaaaacattcaggcacccgaacctgaaggcaccatcgctcttttcccctttctggcctgctgttcatcaagaccctgacagctaaaacgcactatcgaccagaccaggatcggatatggacaggttttcttaacggttgcttttatcacgctagccatcttgatctcgtgtggggacccagcgggccagaggaaagcgaatacgtgagatcgacacaacgagacatccacccaacggccggcagttgtgggtgcaagaggccggaataactgggaacaagtggccgttcttaccgacacatcttcttcgaagccttcttcccgagcctacctaccaccaaccgctcttccacaagttcttcgtatcgtgcggtctgtctctacgaggagcccatactcaccctaggtccaacaccatcccgcagatgtccgatgtggcagcctggggatacggcaaacctcgcacaaatacaactctgcttaagtcagcggtggttgcgttctcgcagccctcacactctctggccgtctaaggggatgggctctggattgggaatggttcctgaatgagccaatgtcccaattcctgccattggtgcgggggtccgtagccgcatcccagatcaggcgatatctgcaggaaatcacatctcgcgaccttcccactgggttccatcgagaccgatgtcgcgctggccccccgtcaatgtactcacaggtaccttaattactggccgaccccactgaccaacaaccctccctgtccggtttcatggttcgctgcccacccttgcccgtcccacgagcctgccgagctccggactagttcagaggattatcagcttcgccggcgacctttccagaagtcagattggctggaaaaagaggggtgggggcggtgggggcacggggaaccgtgctccatgttctgttctgacgcggtcgacgatggggattgcaacgttggaaaggacgccctgcatccgatcatccaattttatcgcctctccatcgcatccgcatgacgagatccaagttctgtttctcgtgtgtcgaccactagcacgagtccgttggcaagtgttggaggttgggggactttggcgggagaggggggggggggcagggcagtatctcgctgaatatcagtcaccaggtcttcctgccatgtggcatgtcgttagcccgctgcaggcagaattattgagactgatggctctgacgttgacagctttgacaggttcggccaattttctcgaacaagaagaagcctactacatacatgtcgggttgataaaaatgcacatgcattacatcgatacacaccgaatctcacctactactattgtgctgtctcattggatgtgttctgttcagcctgaaaagagaattgtgtgtgtttttccccccatcgatctcacaaaatctcttatctcaacccgttcgttcccgcgggctgctgcgcaccccacagtccatcgcatctgatgggtaattttttttttcccgatctgatttccatcgcatctgatctgatctgacccgaccgatcttgggaggattttttcgattccgcagcagccagggtgtgggaattgatttactacgtcaactccggccccatatagccttgttttgagtttttccaacggtcaaagacacatcgggttttgcgttgtcaaggactgaagaaagataggtaaaacccgcattcgcttctaatgcaggcaggatatccaccgactttttcggatgtgtggggggagtatggatgggacttggaagtgtggtcacgggatggggatatggaggtggatggctgggctaaaaatatcgggaattttcctgcattggacacatcacttatcctacctacgtgcggtctgggggggttgcctactacttacatgtgtcactgagactgagaaatgtattctcgtgtcagaagatattttttgtttttttggccattggaaaatcaaggcggcggtggccaacaacatttgtcacacgtggtcgagcagtcagtcagtgtgttaaacgaagcgtacatatataatcgtccttgatatgtaccgatccgtggcaggtacgcggtgtcatcaacaacaagtcgaggctgaaggattggcactagctttgaacagccagacaacgggtgcttgcttttgccttcccgctttttttttctttctttttttttttgaaaatccccgacgggttgtgttacctgtttctgtgcgagggggtatcatggttttttttttggaccagttgatgcttcggcttgatgtatgtcaaatggcagccggcagtcggatagcttctacataatttgcatatttgaggatcccgatgctcggactgggggggggggggacgctcggataggggagtggtaggttcggaacggtggatttcccttgtctgttgctgtacaaccgtggtcgaggtatactaaggtaggacaactctttgctttgttgttttggtggtccgcttgggccgcatgttgggcttgttgagcctccttttctctctcggctgagggggcatggtgaggatatgaggctgacgactgagtgattgtgactcgggcaacggatcatacgtattgcatatatcgttgccttacttttgtacccccactcttttggggtctctctaccagcagctttgagggggaggaggggaggggggatggtcacgagatcaggatgagcttggcgggatcaagttgctgttgttgtacaaggacaagtgggtggactttccgaggttatgggggaagttggagcaactccagatcccgcacgctgagaggttcgatatggtcgattcccgttttcgtgttttagtcgtactggattgggagagaccaatggttgcgagggggggaggttttgttgaacgttacggttacgcagttttgtaacgagagattctggactctctggagtggactggatggggagggggggagcgtaatctcgtccttcgatgttgttgctgtgtgtgtgacagtcatcaggaagttgtggttggttgagtgtggcactgtggttagaaggcccgaagggaggtgtaagaattactttacctatgggagtacatttgagaaatgggtttgtgtgttcccagaagaacaacgcgacttcaagggggcagcgatcatcactatgagagtgggtgtggctgtctcacaccggtcaatatcactgacacatatccacacgccggatgacctcaacggtaggagagaaggggggcggaggggggggacctgtctcgctcgatctggacagatctaggaccttgggtttgggtggtgtggttgcaagcaaaccccaaggatgtcagcacaaacaccaccaaaaccacggagggtttgaagttccaggctgctggccacgtaggaggcgctttgtgacagcttttgctcagggtgcatgggcaagtcacgctctatatttgatgcatctacccttgagatcagcaaaagtgctgttttttgctcgtccggcttgggtgtcaatcagtgcctccccttttcacaacctctaggatgcaacttacacctggaacttttcacggcagctcttcttgtctgtgttcgtgatcatcgttgcggtgtagctattgccacggcacacagcttggataggacagatttcagatcctgcagagggccgatgagggacaaggcctagaaaaatgtgcttcgtatacgatctgctggcttttccccgagagcagatttgtggtctccaagttgtggtcgcttgcgtatttgcagagagatcttgagacaagtacgcctatacactagcacacaggggccgctttcttttcttctttcttctgtgtacatacatgtaagtcagtgtcggtgatatgcacacagaccctttttttttatgtgttctgttcttcgatatcattgcttctttttgtcgtgtctcttgcagagacgctaagctgagaggagcttggtgatgtttctgagcttggttttcccacaaagacttcttccaaagaagggaattcatcagcgcgagcgtgcgcgacaccaggcaagtggtccccgcccccgcaccgttccttgggtccgaccgtccgttggtggtttttgttcccgctgaaggaaaaatatgatatgatcgataccttgcgagcttgcatggagaaatataccatgctgggtgagactacactatgttactagtaaccgagaaagtagatctctttggcatggtgggtaagattttcaacaaagttgcacaagcagaatgccgagttcgaaatgggggaagaaagagtggtgatcgctttgggggaagcgggatcaccaccttgcagcttgcaactgtcaacctcggatcccccgctttttttttgtgcttctggtagccgatcgaaaagctgcccggtggtcagggaattctgaatcgggggtacttgatcctgcttcccctgtcttttccccatctctttctctctctgtcttgctttcccctgcctgccggctgagctgcgctgacgtctatcgcggattcttttgggcatccagctcgcggttgtcgattttcagctctttcctactgacgactatgtgacgaagctaaacccaaaaaagtccagcatcaccttatctcccatagtcacatttatctttcaccactcatccctctcaagctcaactaccgaggtccaaccccccccaagtctaggctcatctggtacgctctggatctgatcagcgggttgtccatcgaaggaaatcagatcagatcaagcccatgacttgcagtcccttccggagaaatgtcaaaagtctggttgaaacactgcagcacacacgcacacacgcggagttgtatcgaaacgttgatctttacctcgaatccggaaccaatatctcattcactatagcagatcgcctacagattttccccatttgttaccctgctgttagcctcctgctagcctaagacatataacggacgataaggcaagttctccaaaattaaaaatccggagaggtaacattgggaaaagccaattgtacgctacacctacctatcaacctgctattatataagcacccaaattgtaactcgggcaggtgccacagtaggcacaggcatttttttagctaatctttccaatgttaactttttggatttttttttgaaaaacttgccttatcgtcctttatagacatggccgtatatggacctacatacatagctgcctttattctgcacaggcagcaaaggcgctaaattcctagcttttttttttttttgcgcgggagaagaaacagtaaaggaagaaaaaaacaatgtctgtcaaaactcttgggggttctttgatccggtaaggactatctgtacggtttctgtgagtcttttggggaggtgggggagtgggtgaatgtaagctatgtctcactctatctcgcaagcatctattggaagtggaaaaaaagtgagatctgagctgcttgtcttgtgtgtgtgtgtgtgtgtgtgtgtgtgtgtgtgtgtgtgtgtgtgtgtgtgtgtgtggtggtggcgagccaagaagggataggcataatcattacatacgtgagaggcacacacacatgcacatcggcatcgaatcgatcttactttttgcctttgcatctcggggacccggagacagggacgtggggaggtgtgagatgatgcttgggaagggggaggcttggcggtttggtggcttttgttggttggggatggggtgctgatggtttttgtcaggtgctggtggtgagcaaacttcaccagaccggccatgtcaacgtgatgtaagagatgatagagagtctatctattgacatcagcacgtaagagggaatccaagtaccaaaaagcatacctacctgaactaatcaagcggaagttctcaagacaaaaattgcagacaaatcattgagttggactgccagtatcgtattcgcgcagattaccccttggaggagataggacactgctatcttttacacggccacaaacatgataggactaagataggtaggtaggtgtgagaaataaatgtcagttaaatgtgtcttcatctcttccaaaacctccaaataagggtatcagagcctatgtagcagatgtgagcacactccatgtgtcaggcatatcttcaataacaacactggcaattaaaagttacaggacagctcacgcgtcataaaagacgctgggtttgtagttatgatatggcgaagaatgggtatggtgttggtggtgtatgcgccatggtggtcctgagatgatgaataactcacctaccaagaagtattccaaggtaccctttgacctgggcgtaagcccagatatagagattcgaacaaaagatttatttcatcaggaaaacactctttagtcgccacaaaagccaactctgcgccttctcaaacttgaactaatgtacatacctgacctggactctgaacctatactgagctcgtacgtgtggtggattatcttataatagtagtaacagatcagacatgaatgtgtatcctcccttctcgctcgtaggaatgagataagcctgattcctaactgcccgattctatttagctcaacgattttgacttctattcccctcgctttacgtctccctgatggatctggtattgtgaaaaccagtgagattgttccaaaagaaacagctccttcttttaaaatgttcgtggataggtatctagagtggttctagagctaaaactttggttgaacctcaagtatctagagtcggacaattacttggccaccgcccaggaacctccacacctcgctgatgacaactttctttcgcctctttatcgtgtcacggagcggttagcctaaaggaggggaaagcggctctgggagactgaggatgctatacgtccctcaggttgatggtagttgggcacctacagagaaggttggttggactgtgagagccacctagtagtcgatgtcctccgctgtccactccttctgtccagaggactcagctatctcgcaagcctctacttcttaacgattctctccagtttcactttaactcgacataaggatcataatgtatcggactcagaaccctggagaggtcggtcggtaataaccagagcagcagcagcagcagcagcagcagtagtagtagtagtagtagtagaggcatcagaatcaattaacaagggagctggcgctcacagcaggcgctcagtcacagacgtgttgcatatttcaacgtggatttgagagaagttttgatttgttgttgtaaacgtagtagtaaattcatgcttcataactcattcctaaaagccaaaatgaaacaagcgttctatcccccaaatcgcagacaaaagttacaatattgttacagggtatctccatcatccccatcatgcgcccatcacatccattatcatatcccatcattcatatgcatttagtaaaatctcctcctgcttccccggccatcagtgccatgcatcctcctcgtgcccgcagccttctggccgggtcttccagtgagagttcccttcaacttcaggaaggcaccactgatcttgtcaccgatggagggccgcctctgctggtgatggacaggggcgacggtggtgtggtggtggtgatgggtggtagtggcatgatgtctgcgctttccgccaaagagaccgcctcggcgacgggtagaggtagtcatgggagcggcggtggtgtgatgagtgcgacgagggccgccgaagagacctctgcgacggcggggagcggtagtagtgactacaggagcggcgtggtgacggcgaccgaacattttgatggtttgggtttggtgttgtggttggtattagttaaagtaggtagtgtttggtttgcagttgatgttcaaattgaactcttgagaatgcttgtttgtttgttttgcttctgtgtagatgctgatgatagtcaagagattaagacctgtgtctcgaggtcagatcaagcaaaatatatacaccatctcatcggcccttccctctccctcccacgtcacagctttctttcaatgtgatctcccatacttgattcagacccttggacccttgatgcattcagatctcgatcctatccacagcttaatccaactttccaaagacagggatgacatcaacctcttgccaaacaaaagaacacaaaacaagcaaaaagtcaaccatgacgagcccctttggacccttgaaccacccaacatcgtcagtggcgtccgctgtggtaatgcgctgagaatctcattggttgccctaaacacccttctctttcaggcgagccttcagtgcaaccaaatgcgcaccaatcagctctcgtttcttggactttttgggcaaccgaagcggccccacacagggtatgatgtcacggttcatgtcacttgtcagacggctcgtgccgtgacaaccgttggactcaaactcgaagttggcattctacctactgcacataccgctgggcactgacggggtaagctccgatgatttgaggacgttgattgttgcgcgagcatcatagcttgcgtgttcaccacgtggatgtgataccttgttcggaccgttgggccgttgggagtggaaacttgcgatattcgacatgacgactgcctatgtatgtaggtagccgaatattccaaggaggaacaagtgtctgctaagaatagaattcgagcattagctaacagcgatagaaggattctagtgggattatacagtcttgatgctctcagcaatatgtgagagtcttgcacggctgggtgatgccatcactttactcaaagtcacttccgatccagacactccttgcctattgatatcccacctcaatattatcacattattcaagtccgaagatatgtcatttcccttgcaccaactttttgtccaccaaaatcaaattacaacttgagtaggtacggaataaataattgttgttaccgaactgtaactgctggctgccccgttccgccaagtctcgcatctccagcacactcggatatgtgtccacaaaacccacattcgataacaaattcacgtcgggaattgttgaaaagccctaatcctccaccagatccacaacaactcaataaaatccccttgtggtgtagttggctatcacgttcggctgtaaatgcaatttatcgataccgaaaggtcaccggctcgattccggtcgaggggacacatcattttgccttcacctcagtaaggtgactctttgtttttgattcagctatgaagactcttctttttttctgggatgctatgtgcttcacaaacaaccctacgtgcataattctggagatatatattatacaatgggttgcttaacctacacagcacagtcattacatcaggtcaccagaacccatgacattggattcaacccattgaaatgccatgtcgttcatcagaaaatcattaaacaggctgtagattcctggtaatagcttcggcgaacattgagtaccaatctttaggatttgctagcaaccttaaaagacccatttcaggctgtttcgtagaaaacaataaacttcctccgccaagggtatcattccaaccaagccactctacagtctcatcaatgccgtatccatactttgcgtcatcatacaacgaaaacttacaacccccctcaagccttaaatctgaaacaatcactcacaccctcgaagctttccacgcctcccaacaaccccttcttatccccaaagtacctgatccgatacgccgtccccttctccacctccccctctccctcaagagcggtatcccacccaatcgtcacctcactccaacccataagctcactcgtcctctcccactcaaaaatcacactccagtccccatcatctctgaacctttcccacgtcccatccttacccaacttctcaacagcagcatacgtgccgcccagcttcagattgttcctcggattggctccaacaaaccgaaccttgaccacatccccaatcacataaggagtacccttctcagcatccgtcaaaacatccccaaaagacttgaaaggcggcgcattgtccatcaccaccgacgggataaacgacaacgaccggttcgtattatccggcggatacaccatagacttctgatcatgcggcggaggcgccggcgaatccgaattcaaataccccaacagccccatcgtgacgttgatatacgccgccagcgtgtgcggtccatacagagtcgaagccccttcatacctctggatcccgtactcctcttccgtagtgatataatgcgtataactgttggccggaccccccaacacaacaactgcatcctctcccgcctcatcgctggtcctcacggcctccttccatctccgtccagccatcgtcgtcgcctccccaggcgaaacaataataaaaagcagtccaactctaaacacttgaacatcaaccacattcggcgtccacggatacggcctctccatctcccccacatccagcaaaatcggcttggcaccatgacacgccctctgctcctcgttcgcatccttcaaaaacctcgacacaaccttccacaccggcgaagtggtgttttcgttcccatcatgctgcgtaaaatcaaacgcccccggcccatcactcgtccccgccgcaaaagaataccccagcgcagccggacaagtctttgccatcctcccacccggcagctcaaactcaaacccggtcatgttgtgaaacttgtgaaaagccttcacccaaccccccctcaccggcgtgagctccccctcgtcaaacagtttcctcgcaggctcaaactgcctcttcccaatctcgaaacaggaactagctccgctgtccggagtttgaaacccgggcccacgaccatgacaagactgtgacttgccatcaacaggacaagtgctattctcaaaactgcacatctcccccgacccatcctcgcaccacgcgcccagaacattaggactcgtatcacccacactcgcctggctgaaaccagccacaaaatctggattctcccctctcatcgacttttcaaacaaataggccgcaacccctttattatcccccgcaataagggtgttgttccccaataacgaagtcccatggacgggaaaccacgtcagcacacccaaagccttctcatcagcggcacgttcaaatttcaagagcgtcaaatccttttcaacggacccgtcgtcttcgatgctaatattatacctcaccctctcctcctcagggttggcaaggtaagcaaacaaactccggttgatattcgcgccaaaaacctttgtcgtcccgacgctgagataccccggcgtgagactctgatgcgcttttctgatggattccaccgccccgtccacaatggctcggtagccttggtgatcaaaccctttgcttgtgatttgtgggaggaggtaattcaaccacccagctggcccagcgtgggagtgcgttcccgtaacagcaacgttgtggtgaccgtacactttatattcctcccccaagctctcgagagcgttgaggatgccgtagcgaacggcggtgtcacctgattgggtgtccagcaccaagtaaaccaaccggtcggaagggttgtcgatgttgccgacgatgaaggcgcgggagtagaggcgttgacggagaccggaaccgacttgttttgggtcggcgtagcccatgaggttgatttcgactacggggccggtgatgtctgctttgcccacgccgaggagatatgtgttgttatttctgttgttattgttgtttgttggtggggggtggggggttgaggttgtccatgatgtccagtttccgggggcttcggcggcaaacaatctaagtagtgcacagccgaggatgagggcgccgaggatggaggtgaggtacccgatgatggaccggtagtatattcttttcggtagtgatctcttgttctctgagtccccgtctttggtctgttgatgtggttgtgatagcaacggctgttgttgataagctccgtccttttccgagtcaacccagacgttggcggggtcgagcagtttttcgtgggcgtccatggtggaggatttgcagggcggaagctacctgcactgcatattctagatgatagttgagagaagcgaaaaaaagtttgagataggtactgttgaagcggtgttatctgttgttggtcacttgaacccaactgtattagaaaccaagcaacatgaacgataggcctggaggtgatttcttggcagcgactgccttgtgtcgtcattgtcgcaggaaactgcccgattcgacaaaggggcggtgcacaccccgctgccaagagtatcggggtgggtggcagccgtttgcactgaactgaggagtttggcattatatttcacttgggaagctgttgtttagttttgaatgtcagaacagttttttctatgttttggatggatgaggcagttgcagtattatatctttaactgccgaagctgtcttggatatctcataccgaaagagcagcaagtgctgtcttagcttgaagttgtcgtgcagacactagataagagctccgataagaaggctaagcccaaccctggcgtctgttcactgtgtagagtggagaccgcatttttccaaagtgagatccagcgcgtcgtaaagcatcgcatcgcgcagtcgcattcattttgagatttcgtcaatttcaaccgtccagcaccaccaccaccaccaagatcaccacgcctgcttcacaccagttatacatcataacaacaacaaaacaaccaaccttttcgccctccacaagttcccaatctctctcaactataaccacctacccgccctccaaaatgccatccataaccaccatccacgagtccctcccatgtaagtttccttcccctcccccccccatctgccctattatccaactctcatcctaacctcccagacatcgactccccccccacatcaacccaactaaccgccgcccaaaccctcattacccgcgaacgcaccctccaccccgacgaccccaaccacgccctcctcccccccccgtaccacccccaattcctcacccctctcctgacatctgaattctcccgcctctccagtacctcccccccaccaaaactaaacgccctggacctgtcccgatacaacaccctcccctcccaaccccccaaccccaccccccactccctccagtcagaacttttaaaagcctacacctcccacgcctacatctcctcccgccgctcccacctcgccctccttgacactacggaaaaaccgcctggctagtcgggaactaccacctcgagggcgagctcaaggccctagagaaggaactcgcccagaccaaacaagagatcgatcttgtgactctggcgaggaagacaagacaagaagaggtcgggccggagatgaggatgctagaggagaattggaaaatgggggtggggagggtgctggagacggaggtggcgaccgagggggtgaggagggaggttttgggggttcttgccgggagggagtaagagattgttgttgttgttggcaaaagagactgcgagaaacgaggcggtatttcgagaaggggagagaaagaggtcaggtgaaagaagcaagggagatgtgtgaggtgggaattgtaacgaaatgttgggagttttacgagtttaccacaacaggggaggttctatgctgaggatcgttgtttagggggcagagtaagggacagacacgtaaaatgggaagggatattgtcataaatatgctggagtttgggaatatacatcagggagaacatgttgcttcacacagaaagtgttaatatacttaaatatggccgggttataaaccaaaagtgctgcccaaagaattgtcgaaaggcgtgaaaaggggtgcgaaaaacttcttgacacggcgctatattccacaagacaagaagcactttgttgtctatgtgtccgtcaacgactatgcatttcacacaatacatatgggtggggtgagcaatgtacataaccctaggcaaacatagcatttgctatcatgacctgtttgctactccttcaggtatctaataacaagccaaagtgtttggtcttgaataatcaatgtaggccaaaaataataatagggagacagcagagtgaaaataataatccaaaactccagccccaacccacaaagccacaccaagaataccatactttgttcccttctccaatatttgttcttttcaccaccaaaaaaactcgagaagcaagcgcccacaccgtgccccattacacctcttttccctattctgatccctctccatgctccatcatcctttaaaccgtctgaaggggatccatctcctccaccccagtcttgacacccacatacttggttctccgcataatactctcgaccggccccagcaaccgctggaacgccgacttgccaagcgacacaaccttgacctcggtggtgctcacgacgctggcggcgcgtggtgcgtcattaagcagagcgagctcgccaaagaaatcgcccttcttgtagtgcttgacagcggtctcgtcgcccctcctaagagcgaccgcctcgccatccacaagcaagtaaaaggagtcacccgggtcgccctcgcgaataatggtgtgaccggccgggaatttctcgctcttgagcgcatccgcaatcttggagcgctcatacggggtaaggcttgagagcaaaggcacctcctcgaggaagccctcgtacatgcgacgacgggcaaaggtcgactccatcaggatcctccggaaggtcatacggtccaaggcccagagggtgcagttgggctcggcggaaataacagtagcggcccgcggggcgttgtacatgagcgcaagctccccaaaagaaccgcctgcaccaatggtgctaaccttcctgccagccccgtccaaaccaggctcgacctttcctgtggggctgacgtaaatatcgaaagaacccttttcgatgatataaaagaagtcaccggtatctccttgggtaatcacctgccaaacacattagtcgtgccctttttggccaacacgaacgcccaactcaccttgatatccttggatgggatcggtttttctatcaaagcccccaatacctgggcggtttgctcgtcatcgaggtggctgaacaggaaattgccgctgatggcttccttcaaccgctccagctgctcgggcgtcttcggatgcacaggaggtgtccaattgtcataagcttctccggtagggggtttcagtgactcggccgataccgaagtgcgacgacccaagttgtactgggctgggtagcctgttggatcaagatggggcctgttgactccagtcatgtgtgtatcagatgccgcatcggcaccaaacgggcttcggaagagaccggcgccatggtcggctggagcgcggccaaagcccgccgttgtgggcgaagtcaccatgtcattttcgtcctcctcggcgactctttgcataccagtggtctccagtctgccaaatgggttcgagttgcccccgaaaggactgctgaagccagtggacatgttggacaacgttcagaaagtgggtgtggtttatcgattggagaatttcacgatctggttcgaaaaaagggggccgagcctgatgtacttgaggtcggcctgggcgagtatgtcggttacagagtcaggataccaactctgtttctctctgggggctgcagcacacggttagaacatggccgactcaagcggtgcaatgcgaggatgtaggaaaagggccatttagagacaaaatgggctgcgcgactcggagaagtgcagggcgccggcaagctgctgttgtatgaacggtctcgtcatgcagagctcaaacccgtctggtttcgccgaaagagaaattgagacagggcaacaaaagccgtgaaacatgagaaggcatggcttgacttacttttcggccagagacacaggaggcgtcgatatggtttggctggacaaagccaccgacggtgggagtatgtgtggtggcgtggctatggggagtctgcggcgttcgggatccagaagcgggagctggcgaagaggggtagtgttgttgtaggagaaaaagatgccgcagtcgacgaggagctttctcaatgataaagaacaggagagagagggtgcaatccgagctaagccagggaggtggtagggaagcttaacgatcggcttgcaggcgaacaaggaataaaggccgggacagacaagtccggcacacggcggcagaaattgggagagacgaacggcagggtcgtgtaatgtgtattgtaggtatgtagagtagagatagtgacagcagaaacggagagagttagtacaaggaggttgggttgagcaggaggatcaggtatagaagaggccgagatggcaagatgcagagatgaaaaaataaaataaaggggagtccaggaaggcggaaaggggggggagactggaaggcgaggaggggagatggaggtgaagctttacgtttggcgagtggggtggttcccgccctacagttcgacagtgcggtatcgagacgcctgtgttccctgcatttcatcaccgaaagactttggagccatcaaggaccccagtcaggcccgcaaccaggcggcgcaaatccggggagacgccactttggagcagcggttgacgactaggtagagcaagatgatatctaatactcgcagctcagagtcatgagtgccgtgaccaggcacatgagtgacatggtgagagcttgctgttatcagcagagtcactggctgagaacggacatcaggcccccttcacaaccaggacctccctctcgctttgactccacaataccgctaggcgcaggccagtcatttgcgtcgaacaattctagaaagcgcatggaccgttatatggcccatgccttggccgctgacgtgctgctgaacttgaccgatcttctgcttcggcttctcttgcagatctgccgcagcgtgctcaccaggtggcaactgcgtacccttggcaccgggagtgaaagaaggaatgcttctgtccggatttggggcacacaagccagggcaacacttcagacgttggacttggggctctgtctgccggtggcctggcacatgcgcaggaacactgtctggctgtcactcttccataagacttcatattggtactaggacggcattgctgaggcctgcagctcctccaatccctactatttgatagacaccagatagtcgtcaacggtacggatatgtcccttaccagagagattcgtatcaatcagacaatggctctcgcccgcccagagtggtattcagcaatttacgaacctctgatcggacaccccgagagtatctcaatctccactgtttctcatgatttcccctgtgatgaacagtcccatcacactcgatatttgtcccacgtgccggatcgcgtgaccgctctctcttgtctggtcgtcgccgttgggttgttccaaaaatggatttccttctgcctgtctccgtcagcactggagccgtcacagcctcctgccaagacacagcacgggccattgaactcgccgcagacaccgaagactccgtgtcttcgaaacgctccttttccagagatcctctccctttgacaaccccccaagccaccccgcaacgacgacgacgacgacgtcggaaaaaatacgcccgccatggctccgagacgtcgccgcggagcctccgacgatgctgccgcagatgaccactccgagacggatgcgcccaagaaccgcccacccaatacagcctttcgccagcaacgcatgcgcgcctggcagtgtgtgctgacaccgaaacttattgtcaccatcttctccattctcgccgccatctaccttggcttcggcgcctatcttacataccttgcgcatactgtgggttggctgtccgatgaactgcccttgtagggcacatgcttataaattatgtttccaggtccgcgacatctcgatcgactacaccaagtgtatcaccgacgcaccaacagatgactttggaccgattccggctgaaaacatcgaggctcatttctcggtgacaaatcccgacttggatcccttccggtctcagtggaaaagagagacgatcaatgatgtcaaggtcgccaattacactgcgaaacgggagtattgctatgtccgaatcaacatccccgaggacctgaagccgaccatcagcttcttctatcacctcaacaacttttaccagaaccaccgtcgttatgtcaattctttcaatgccaagcaacttctcggcgacgcagtagatggcggcaccatcaacgcctccacctgcgcacccctgactcacaaccacgagggcaagatcatttatccctgtggtttggtggccaactcaatcttcaacgacactttctctccgcccctgttgttgaacccgcgaaattcgtcagaggacagtgtcgagtatcccatgtcgaccaagggcatcgcttggcctggaatcaaagacttgtatggtcttacaagctacaaatattcagatattgtgcccccacccaactgggaggagcgttacaagtttggttatgatgaggtgaacaacccggtaccggatctcaagagcgacgagcttttccaaaactggatgatgttggctgccgcgcccaacttttacaaactgtaccagaagagcaacaccagcgaggtgatggctgctggtacatacgagatcaagattgagtccaacttcgacaccaccaagtataatggcgggaagtctttcgtcctcaccactgtctcgacaatgggatcgcgcaacatctggccaggaatcattttcctgattgttggcggtatctgccttgttcttgacgtctacttcatcttgtcgttctttttgtggaagccgcgcaagcttggcgacccatcatatctttcgtggaaccagccatcggcaccacaggggcatgcttcgacttcatagggccacagcaggggcggtgggagaaaagtagagttatgagagcattatagggcggggctggactcgtcgttctgttttctgtctgacaacagtgtgcagtgtcttgggaatagctttggggttacacggcgtatggcggtcactgggtttttggcttgttttcttgttatttctctatgccccacgattcctggaaaggacgtggtgagttgtcatcagttttgcttgaactgtactgtacagatacctggctcctctcggggctctatttggcattggggtgttctgaatcgaatgaatataatgacgtgttcttgcctgacgtgcctacctaggtaagtagcagactcgcaacagtttgtgaacgcccgccgacccatctactaccaatctgtggtcagtgctgtatttctctagcaagaaccgtccactaatcaccaattcactgctcgcaccgacgagcctttgctttgtcttgccatccaccccgcaccggcgacctttcaacactcgattcgccgtcccgagtcccggcaccgaataactcacggcagctagtttcatcttccaaaaccccggatcattgttggacctcaagattgaaggaccaagattttcattccctcagactgctcagtcagaaaagtggcagcctcaggccactaaaaaaccacttaggcaaccaagcacgccaaaacgcgacggggtggtccgtgaacgtccagcaacgcgacacccctgtaaatttttgccttggcccgccgagccttgttaagttgttgcaccctgcacacctcctttgcccggcggtagacaatctgctacctctccatctccatacctaccgacaaccacttttccatcgagggcgacgactcttcccaccagcatcatcaccccaccgactggcttttgcgccgccatcgccatcgtcaacccccgcgaaagcgcagtcgcccatcatggccgacatcaaaatcgacgccaaggtcttccaggagcgcatctcgcattttgtcaacgcctggaaggccgacaagcgctccggcgacgcgctgttcaatggcgcctcgtccatcctcatcctgatgggcaaggtcaccgaggagcccgagctctacaaaaataatgccatgcacgtaagtttatcaacattgccccggattgtagcttgcgccgtctgacaacaagctctgcagttttggctcctcggctacgagtttccaacgacattgatgctcctaactactgataccctctacattctcacgactcagaagaaaggtcagcttgattgatctccggctcgattgccacctgttttatgcgctgacactgcctacagccaaatacctggaccagatcaagggcggccggttccccgtcgaggtgcttgtcaagggcaaggacgcggccgaaaacgagaggcacttcatcaaaatcacagatgccatcaaggcagcaggggtgagtcatcacccgcgtgagttcgtatgtctgttttcggagctaacgagccatggttacagaagaaggtcggtgtgcttaccaaagacacctccagcggcccgttcatcgatgagtggaagaagatttatgccgacaactgcaaagatgtggaacaggtcgagatcgctccggcactctccaccgctgccttctctgtgaaggacgaggcagagctccgcgccatgcgtagctcatccaaggcctgcgtggcccttttgaccccgtacttcctcgacgaaatgtccaacatcctcgaccaagacaagaagatcaagcacagcgccttggccgacaaggtgtacaacaaactggaggacgagaatttctggaagtctgtccagcttcccaatcgccagaaattaccgagcgattttgacccagaacagcttgactgggtcttgggtcctattgtgcagagcggcggaaaattcgacctcaagtggcagcaggactcagacgacgagatcctccaccctggtatcatcattgcggccatgggcctgagatacaagtcatactgctcgcagattgccagaacctttatggtggaccccaacaagtcccaggagagcaactacaagtttttgctctctgttcacaacatgatcctgaaggggatccgggacggggtggtggtcaaggatgtctactccaaggctcttggcttgatcaaatcaaagaagcccgagctcgagaagcatttcttgaagaatgttggctacggaattggtcttgagaacaaggaccccactttggttctcaacgccaagaaccaaaggactctgcgggatggcatgacacttgtcatcaccactggattcagcgacattcagaaccccaacccacaggataagaatagcaagacttactccttggttctcaccgacacagtccgcgtcaccgctgcagagccagtggtgttcacaggcgaggctcccgtggaggttgatgctacctctttcttcttcaaagacgaggatgaggctcagccaacccccaaaaaggaaaagagagactcgcgagtcggtgctgttgctactaagaacatcactagcactcgcctgcgctctgaacgcaacacggcggtggatgacgacgctgaaaagaggcgtcgcgctcatcaaaaggagctttcagcaaagaagcaggccgagggtttggccaagtatgccgagtccacggccgaccaaaacggcgtagaggtgaagaagttcaagcgcttcgagtcgtacaagcgcgataaccagttcccacccaaggtcagggatatgggcattgttattgaccaaaagaacgccaccatcgttctgccagtgatgggcagacccgttccgttccacgtcaataccatcaagaatgccagcaagagtgatgaaggcgagtggtcattcctgcgcatcaacttcctgtcacctggtcagggtgttggacgcaaggatgatcagccattcgaggatgcctcggctcacttcgtcagaagcttgaccttccgttcgactgatggtgatcggtataccgacattgccaaccagattgccaacctcaagcgcgaggccgtcaagaaggagcaggagaagaaggacctggaggatgttatcgagcaggacaagctggttgagataagaagtaagaggatttcgcttttgactactgtgactgccactaacctgtgtttcagaccgccgccccgctgttttggataacgtcttcattcggccggccatggaaggcaagcgtgtgccaggtaaggtagagattcaccagaacggtctccgctaccagtcaccattgagcaccacccaacgtgtcgacattctcttctccaacgtccgccacctgtttttccagccctgcgagcacgagttgattgtcatcatccacgtccacctcaaggaccccatcctcttcggcaagaagaagaccaaggatgtgcagttttatcgtgaagccaccgatatccagtttgacgaaaccggcaataggaagcggaagtataggtatggtgacgaggacgaattcgaagccgagcaggaggagcgccgtcgtcgcaacgagctcgataggctgtttaagagctttgccgacaagatagccgaagcgggcaagaacgagggattggaagtggacatgccgctccgcgagataggattcaatggcgtgcccttccgtagtaacgtgtacatccagcccacgaccgagtgtctgatccagatcacggaaccgccattcatggtcatcacgctggacgacattgaaatcgcccatctggaacgtgtgcaatacggtctcaagaactttgatctggtctttatctttaaggactttactcgaccgccagcgcacatcaacaccatcccggttgagtcgctcgaggacgtgaaagagtttctggactccgttaacatcgcctactcggagggtcccctgaacctcaactggtcggtcatcatgaagaccgtcacggcagacacgcaccagttctttttggacggcggctggggtttcctccagaacgactcggacgaggagggcgggtctgacgaggaggaggaggagtcggcgtttgagattagcgagtcggagctggatgttgccagcgagtcgagcgaggaggactcggactttgacagtaatgcgtctgccgaggctagtgatgaggcggagatgtctgatgaggaggagggggaggattgggatgagctggagaagaaggcgaggaagagggatagggagagtgggttggaggaggaggataataagaagggggccaagaagcagaagagaaggtaaatttggatggggtaaaggagagagagaaaggggaaaagaaaaactggtgatgatgatggtttggtcttcttttttttttgatggggtctttagcaggttatcgtctactgactggtctgtttctgttgaagggatagggaaggggggtaccaacaaagtgtatatgtatttttctaggctttttctttttagtaaaaacggaaaggaaaggttttttttcgttgtcttaatttgattacctaccctgtcacccttttctatcttgttggacacagaatggcatggctggggtggtccaggcaacaaggcgatgagttggcatcttggggtttgtatagcaagcagcttgtctagctaggtagtgttggttattgtatgactattctacatgaaatttcccttccctcattgtgaccattatcgccgtggagacctatgtgcgtgcaaagtaaatcgtaaaaagcaaatggccagcaaatataaacagtcaggtaattaccaccatccttgaacaagattatctaccaacctgtcagcaccacagagatcttgctgttccaaatgtttcaccactccacacccagcacacacaacctccccaccctcggcgaccacccaaacgtcagcatcactcttgaatacaacagccgctcctccacgtccctcagcgaatcgttatcaagcctagtcagcaccttccacgactcataactctgctttgccaccacctcctgcggctggagatcatcaaacgggtcgtccaaatcatccaggtcgtcaaagatgtcgtctccaaggaagtgcttttcgtactcgatctcaacactgtcgcttttctcctttttaatgctcacatcaccattgtcatccccgttcttgacagcgacgacacctccatcagcgtgagagtcgtcggccagttctgaaaacacatgcgtagcctgcgtgtgtacagcttcggctggggcagtgttgttattcccgaataggagttcagtccatgctctatcactccagatcagtttccctgctgccacggagccggcctcgtctgtcaaggagccgatgatctttgggttgagggagagctcgtgtgttttgaggcagtttttgcaggtggcgttggcgttgtgggagtagagggggatgttgcagctgagaagcaaaggagtcagtatacttgagtggaagggatgggggaggtgatcaaggggtaaaataaagtgtaggaaacgagttcacaaaagggtaagtgaagatgcgagcctaccattcgaagcagcagagctgccgcttcctgcattgctccacaatcgacacccccgtgatcaacaggttgagtttacctgtgaaaactacctctggtacttcgcggacatactcatcaatgtctgccagcgtgtagagcgtccggccaggcccgtgaatagcagcgtcaacatcccaaatgtcaaccgggaaggggatatggacgctttcttttctcgtgcgagcggcagccatgtgtcgaagccagtcagcgtccggaaagtcagggtcgacctcgaccatagaactcgatccgatgccaagttccaccagcccattgttcctgatagagtgcttcaagattgggttggtgatgagaagaatggtctggttggcgacccaggatttggccgaggacaccttgtcctcccagagtttgagcacacagttgttgcatgtctcgtcaaagactcgaacttcgatcaactccagatctttctgcttgtccttggaccaaaccgtcaaacatggaccggcactgaagacgcataccagaatatgggcgtcctggttgtcatcatacccactgctgatgtaggctttgagactcatgagaccaggaacctgagataaattgatgaagttatcgtagttcaaaggcacacggcaaagctcggtggtgtcttgcgatggattggtttcgttgtggaatctgatacaggatgttgaccctgcagagggatgaatggagatcatcaacgagacgaatgggattcgaaaattagaatacgctatgtgtgctgccgagtaatcggccacaaagccagtccagacagttacgagggtgccgagtttgagaaagtcctggtcagagcccgagcttaggagtttgagctgtcatgtatattagaactgaccatgtactaatgaatagggtactcacaaggacaacgccagtgtcatctttgacgatcagcgtgtgaaagttctctgggagcgcagagcgacctcttcctcttccatgtgtggcggcagaaaagttcacgatcctcgccttgaaccgaaccttggcaggtccaggttgaagttcagcaatagtgacttcctcgtagacgccctttggtcgccaggattgtgtaagtggtcggcgagctgcctcaatctcggcctgcgtaaaggcctcgttctcaggattgtgaggtttgcaagacctagagggggtcgagtctttgtggtagaaggattgtatcgacgacatggtttgtgtatgacggcagctaacggccttgtacgaatacaattggtaaggatgccgacaaaatgatattaaggtataagagtgagcacaatgctcttggaattggtgaaaatgctgtgtgggtttcccatgaagcagggccacataagccctgcccgtgtgttccttcctcgccttctcataatctcagtaggcccttcctcgccctctcatccggaattccaggagctccttccgcctcgcaagctaggcaggcacataacatcactcaagtttccgactttttgggaagggacgagggtaagtccacatgaaacagaaacctcgaacttgtcacgttcaacgctaggtaagtgttctacacaaatgttgacccccaaactccatcccaaattccccgacaaatgctcaagccagcttggacgccttgggcgcactgtcgcccacctccttcgccgcacgctcccgcagaatcttgcggagaatcttgccagactaaaatcatcgtcaatattcatcttcatcgatgtgggatatgattcacttaccggattctttggaatctcggccacaaacacaacaccaccctttaaccgcttataacgagtaaccttgccctccatccatttggcaacgtcctgctccgaagccttcgatgttggattccgcacaatgtacgcccgcggcagctcttcaccgttgatcgttacaccaacaacagcagcatcattcacgtctgggttctcaagaagaagagcctccagctctgctggtgcaacctggttacccttgaccttgatcagctccttggagcggtccacgatgtggaagataccaccgggctcatacttctccacgtacgagatgtcaccggtcttgagccaacgagtcccatcgccgtcgaccacgatagtatcggcagtctgttcaggcttgttccaatagccacgcatcagagtgggacccgacacccagagttcacctcgctcgccagccttggtgatttctgtctttccatccagagacatgagctttgccttacagttggggttcatctcacccacaccaccggaggaaccctcggtgctgttaggatcccaggccattgccgtgcaggtgacctcggtcattccccatccctggcggatgtagtcggcatttggaagcatcttttcaacttctctggcgacctcaaggcccaacggggccgctccagatcctatgctctcgatactggaaaggtcgaacttcttggccgcagggtgcttggcaaaggcgatgacgattgggggtacgcaagccagggtggtgatgcgaaacttttggatatacgtgagaagcttcacaaaatcaaagccttgcatgatgtatactggggtacggaggtacggcatggtggcgacgaagtatgtctgaccgtatgcgtgatagagtggaaggaagcagaccatccgggctcgcttctgcttctcttggaattggggatccaggttgttgatgtagacgacgccgacactgttggcaacataggagtaatgagtgatcataacacccttgggcactcccgtcgtcccgctgctgtagttgaggcagcagagagtgttctccgggtcagcaggctcctgccacgaccacttctcagcctgtgagcgattgccaacaagcagctcggtccagtgtcgggccccttccgccttcccctgaacacctgggctcgggttcgtggaagcaatcaactcgggagcgacaggggtgttgccgccaaggatgaagacgcgatctctgggcagtccggcctcctttgccgcttcgaggcccgtcttcagagctgcctcggcaacaaacatgtaactggcgccactatcgcgaagctgataggcgagttctcttgtcaccatggttgggttggcaccagtgaagatgccacccgccatgagaacgccgaggaaaatcgaggggaagaaaatgttgttgcccgagaagatcaagactcgttcgccagtcttcaagccggccttttgcaggcccagggccaccctcttcgagaggagtcggtagtcactgagggtgatgtagttgctgtcggggttctcggggtcgatgaacgactttgtatccgcgagaggttcggttgctgagccaaagatccatttctgtagggagctgcgtggaatatcaaccgtccatcttgagttgatcaccattttgggcggttactggttggctatgggtcggagttcgagtaacaaaaggaggaggagaacggttaaaggaacggtgaggaggacggaaggtgagccgaacgccaatatgtataaacgccaaaatgattcacgatatccactcgcaatgttcttgaagcaatccgaggaagttgtgcaacttgaccgggggggagggggcagctgggtttattaacgaggaacgggttgaccgcccgccacggaacacgtttgtcgagggcccctaataaataccccaacttggtgtatgtctggttcggacgggacggtgggctagggagacgttcgccggttcgcccgaaatccgtcttgtttccatgactctcatattcgagggaaggggacgagctgaggggagctatggtcggcttccctacaaaggtgggggtgcgcagaagtgccagagatctggaggaagtggaagcttggagcttcaacatcctggaaggtgctgtgactaggaaaattattgatgttgcgattggacgcctttgttggagaaggaggatggcggttgggggagcgggaccccatccccgcgttttgcaaggaccagcttccccgcagaatgaatggataccgaggttcgagaccgatttggcgacacggagcaagacggtgttagattgaggagtgtttgcctaggtatggatagacagatagatgtctttgtcaggatcgcgattatggaagaggcggaaactcgaagtcaatcttcgggaatattccgacgttgtcggctggtggccgttatgttcgacatcgcatcaccttccgacactgcatcttggatgttgctcgccgtggacgagagctttatatcggtttggttacagcaaatatatggtgactggaagccaagttgacttggctgcacgaccgtccctctttggttgagggttgtcgctagccgacaagtccacgccaaacctcggattttcaactcgagatatctgaaagggtccgtcccatttgttacacaagattcctatctgccccctaacacggaccgagccacaggaaccggagtcagacgttggcacaccgttgtagccagcgcaggatgattgttggttgctggtagtggcgttggtgttggccatggagcttaaatccacgtccagtctcaaaacagtctcaaattataacgtgcaaatgctgactacaagtcaaagagcagacacagtatgtgtctggtgtcagaaaaaagttggaaaaagtaatccgacgtgggcctgattcgaacagacgctcccgaaggaacaagatttctagtcttgcgcattagaccactctgccaccacgccttgttgatattcatgtgactgaaatagcacttatgtatgtcagaagtagcctgcatcggcatcgcctctttgcatcaacctcctttccagtcatcttcaaaaacaacatatattttccacccctccattcacatctcaaatcacatcaatgcccaaagtccaaacacccccgccacccccagtgtcaaccctcccacaatcaccctcccacccccggagtcatcaccaccacccccgtcccctcccaccccgtcatcaagaaaatacgcagctaatacacccccccaaccgccagaaacatccccctgcctcaccaaaccaatctgctcaccatccctataaaccatattctccacacttttactccccatagaaaaccacctcaccccttccatcgtccccctgacaaaaaccatattcgtctgacaaaccccacccgtcccctcacactgcggatcatcccacaagttatcatccatcccgttgaaaaacacccacattgccgacccgtggatggttgtatcggtcacgttgtcgaggtacgctccccaggcgcggaagcacctgtcatcaccaccctttccttgtttctcacaatgatgaaatgctacctctccctcccatggccccggagctcgcaaggaagtaccctgaccctgccagtaaggtgattcagtctgttgccctatcaccagaatatctctcgtgtcgaagaagccgtattgatacagtacgcagtgttcgaagctcgttccgatcatggttaccggccccgaggtgtgggagatggtcaacccgcgaccaacggctatgttttgcgctgggacgttggggatcacatccaggggatggtcggctgcccagccccagatgttttctaggtagatgtttgacgctgtcgaggtgatatccaacaaggtgtgcgtggcgaggcaggttgatgggtttgggttggagcaggaatcggtgatggttgtgtcgatgctgcctcctactctcagcacgacagaccagagggagacatcggggagggagatttgcaggagggtggcgccgggggagannnnnnnnnnnnnnnnnnnnnnnnnnnnnnnnnnnnnnnnnnnnnnnnnnnnnnnnnnnnnnnnnnnnnnnnnnnnnnnnnnnnnnnnnnnnnnnnnnnnnnnnnnnnnnnnnnnnnnnnnnnnnnnnnnnnnnnnnnnnnnnnnnnnnnnnnnnnnnnnnnnnnnnnnnnnnnnnnnnnnnnnnnnnnnnnnnnnnnnnnnnnnnnnnnnnnnnnnnnnnnnnnnnnnnnnnnnnnnnnnnnnnnnnnnnnnnnnnnnnnnnnnnnnnnnnnnnnnnnnnnnnnnnnnnnnnnnnnnnnnnnnnnnnnnnnnnnnnnnnnnnnnnnnnnnnnnnnnnnnnnnnnnnnnnnnnnnnnnnnnnnnnnnnnnnnnnnnnnnnnnnnnnnnnnnnnnnnnnnnnnnnnnnnnnnnnnnnnnnnnnnnnnnnnnnnnnnnnnnnnnnnnnnnnnnnnnnnnnnnnnnnnnnnnnnnnnnnnnnnnnnnnnnnnnnnnnnnnnnnnnnnnnnnnnnnnnnnnnnnnnnnnnnnnnnnnnnnnnnnnnnnnnnnnnnnnnnnnnnnnnnnnnnnnnnnnnnnnnnnnnnnnnnnnnnnnnnnnnnnnnnnnnnnnnnnnnnnnnnnnnnnnnnnnnnnnnnnnnnnnnnnnnnnnnnnnnnnnnnnnnnnnnnnnnnnnnnnnnnnnnnnnnnnnnnnnnnnnnnnnnnnnnnnnnnnnnnnnnnnnnnnnnnnnnnnnnnnnnnnnnnnnnnnnnnnnnnnnnnnnnnnnnnnnnnnnnnnnnnnnnnnnnnnnnnnnnnnnnnnnnnnnnnnnnnnnnnnnnnnnnnnnnnnnnnnnnnnnnnnnnnnnnnnnnnnnnnnnnnnnnnnnnnnnnnnnnnnnnnnnnnnnnnnnnnnnnnnnnnnnnnnnnnnnnnnnnnnnnnnnnnnnnnnnnnnnnnnnnngatatgatgaaaaaatagaatgatggacaagaagctacgtagattaaaatgcgtagcatcatatttattagtcggcggtattaatggttccctttttcatagtagttcgtgaataaatattaattggaatactaatggaccagcatactcgaaacagactccactctgtaccaacaaaaagaataatagtaaaaaccatagtcgaacaagaattatgcgtcgagaacagatgatagcaccaacaacctcaccgcccccgtctcatagtgcttcagcagcctcagattaccaatcccatgcaccgcccaccccttcttcttgttgctgttattatcagtcgacgagtcgttctcgtcagcctctcccgtgttatacttcattgccttggcgcggacttcatggacgacggactcgtcctcctcgccccggccgccgtcggttagcgagatttgatgctcctgtggtgcgtcatccccgtcagcgtttgtcccttgagtgttaccatcttgagtagcagtggtggcagtagcagcagcagcagcagcggcagcattattgccgctggcagaaggctcgggggtcccagcagccggcgtcgtcgccaggcttgaagcacctccgaatgtgaaaggggtatctgggggaaaaggggaaaagaacgaattaatatggattttgaagtgaagtgaagtcaggggtagggcaaatactcacttgtacctgtagaggttcccccaccaggagccaaactgtttgcaaagatggaacccccggcggggttctgggacgcaccaccaaaggagaacacgggccccgatgaaggaacggcttgagaagcgccggcatccgacgcgccaccgaagctgaaagtagggacaccgcccgcactaggggcaggggtgctgccaaaggtgaaggactgcgtggcggcaggagcaccactgccgaagtgaaagatgtcggggcggtcgggggaccgtcctggcccgacgtgaatgggttgttgaacgagttgttggccgagttgctaccaccggccgtgaagttgaacgaggtggaagcgccggcagtggcaccggcgttgccaaaggtggaaccacccgccggcgccgcaggctgcgaggtaggtgtagatccaaaggtaaaggactgtgtagccggaaccgtagtctgcgaaccaccgaagctgaaaatgttgctagccgggggcgcagagggcgccagagtctggctgttagcaaacaggctggcaggaggcttcgactctggctggatcgtgcttccaccaaagaagggcttgctctctggcgccgaggtggtgccaaacaggctcttcgtctccgtggcagcggaagaagtgttgccaaacagcgacttggtctccgccgcaggagcagcaccaaacgtaaagggcttggcctccggggcaggagtggtgctgccgaacaaagacttggtctcgggggccggcgtagtgctaccgaaaagaggcttgctctccggaacaggtgtagtcgcagtgctaccaaacaaactcttagtctcggtagccggggccgcagtggtgctggcaccaaagagaggcgtgccggcagcggcaggctgtgtgttgcttccgaacaagctggcacccggagcggcggtcgaggcgccgaacaagctcttagtctccgtggcaggagcagcagtacctgcgccaaagaggctcttagtctcggcaggcttgggagcctcaggtacaggagtggacgcattagatccaaaaagagaaggagtcgcagacttggtgtcagtgctgccaaaggcaaacttcttcgccgcaggctcctcggtagacggggcagtagcggaagcaccaaagagggtcttggtctccatcgtgggggccacagtgctcgcgccaaagagactcttggcctcggcgggcttagcagcctcggtggtcgcagtgctgccgaacagggacgcggcgggaggagtgctcgccgcaggattctcctccttcttggcctcgccaaataggagcttggcaggggcaatctccttcttgttctcaccaaacatgtccgtaggcttgaaggtagcagtagcagtagcagccttgttgtcggcagcaacgctgatagacttgccgccgaaggtgaacgaggtaggggcagtggttggcagaccaggcacggtggcaaccttcttctcctcctccttcttgggctcagaggcagcgggagcagcgacggacgagccaaagagtgacgagcctgtgccggtagacgtggatggcttaaatccgccaaaagcaggagtagcagcaggagtcgaatcagcgagcttaggctggaagcccgagaacaggttagcaggaggcttggaagtctcctcggaagcctcatcaaccgtcttcacagtacctccaaacaggttagtaggtgcaggcgtctccttgggtgtctccgcaggcttggccgacccgaaaaggctgccactaggcgcggcaggcttgggagcagtagaaccgaacagagaagtgcctggagctgtagccgcagccggggccgcgaacttgataggagtattagcatcccaggtcttgttggcaggcgcaggcttaggcgcaggcacaggggcagtctccttgactgggctgacagctctctccttttcagcaggggtagggaacagagatccatcatgagtaccgagcttccgaactggcttgccgtcagcgtcccgtgtgattctttcaaacaggctgcggccctggctgaagctctcgcccgcctccgacgaggagctcgaggtgccgttaaccgacgccttcttgtggccagatgaaccctcgccgctgtcagtctggtcctcggatccgctagcctcctcggtgtcctcttcctcggcatcggattcactgtcactgtcttcatcagcaccctcattaccgctgttcttgctcgtgtcggacagatgaccaaagatattagacgacccagctggcttcgaggaagacgcaaacagcccgttgggcttggctttcgtgctaggctcgaaggggctgcttgtcgaagccttcaaggacttgacaggagtgttgttcgcgaccttctcaaacagagacttggtagccgatggagccttggcaggggcaggacctggcttctgcaacttggccggctggttgctctcctcgggctcctcgtcggccttgcgcttgttcttcgcagaaacctcgagcgcacgagtgcgctggatactgctcagaccagggcctgggcgggcccctggctgagggctcagctcgatcgacgccttgcgcttcgctccgcagttcgtcttgggcgcagtctcttcctcgtcatcggaatcggggatattgtgcttctccttccattccttcttgacagcctcggaggcgcgcaccgtcttgaactcgtaaaggccatatcgcagcatgatcaagcttcggctcttctcgtactcctttgcaaagttcaagatattaatcttccagtctttcttgttaaaaacttcgtcggcggcatacttcaaccgtcgcaagtcgagaatgcaaaagaactggcgtctctgttgctcgtcgagatcgggggggcagtagtgcgccaggaactcgtcggcatagaccgatccggttcggttgagctcactgggcacctccttagccatcatttctcccgtgagatgaaccggtggggactgaatcctcatcttgaagagatcacccgaggtggatggttggggcagggcgcgcccattaagatcggcggtagcagcccgtgtcgtcgccctgccgggggtgtttggcgggaagctctggttcagtgagctcgtcggcttcgaggacgagtagttgggaaggccagggcgggatgagatggttgaggaacggaagatgttggttcgggtagagctctggcctgtgaagtttgtattggggcgcgtcgccatggacgaggaaaacgaggagggtttgttgggattgtcaccaggcatccgtcttggtgtcccgatcgtgacggttctggtgttgagatctgatgctgtgaagctctgggagagcttgcttgatgggccatggggccgaccgatgattctgcgcgaagccatctgggagtcggaggcgcgcttcgccggactctcgggcgcagacgacgcgctggcgggacgtggcagcgagggcgcagcgtccttcatggtggcatccttcttggagtcctgctcagttggggtggtagagcgctggaacagggcgccgaggccgaagatgcttcgcttcttggatgagggctccatgattgcgagtcgctcgtgtggccggtgttgagctttttgagtgcaatcggagggagaggccaaaagtcgccagaaaataatttctattatctagacaacaatggcagagtcgagacaagggagtgagcgagtctctcttgtcgatagagccgcagtggtgggttggggttgcgtcgcgtgttaggtcgcgtcgttagtagtggtaggattttggtgaagaggcttttcgggccctgttggggttgattgacgtgatgtgatgtgcgcgaagttgcgcggtgtgggtttgcgactttttggcgcggctagggctgtcaaccaacgcgctttctatcgggcagagatagcggagacgtgggagacagaaatgcaggatatggtggtcctgtgaagagacaggcagacgatggcagattgccttggtcgacagctgggagcagcaacaggaaaaaaatccttgcaacttttcccaagcaaaagcagcggcacaggagagcagcaaagctggagaaagggcgctagctgggcaaagcagagactgggggtcgtgtgcacgggccacattcttctcctgaccgattgatgacttctggcgccttctttaggcgacggatcttgccgaagccaaccattttgctgtctttgctgcaactctttgagcagccttgcagacaatgtagctgtaaggtttttcactttggcgcggagcccgatactctatttgatcttgttttcacatggctattgataggatgtaagcagtaagcaaaagacttccaagcaacaccaacttctatctatacctgtcagttacaggggggcagttgtggccttggtgagaggggcacaagtctcttcacctgacaagagcatgcttgagccaatcattttgtactgcaggccccagagactcttgcccctcggagagagctgctccaatgatctcagtgctcctctccaagtcgtgtcctctctgacatgcaaacaatacttgggccaaatgtccagcatatgccttaccttagcatatactccagccacggtatatcagacccaagacaacggttcagccaatagcctgcaaagtgcaaagttttaattgttacaaaccctatccccaatgcccgttcaccctccccacgaaatagttgatacaaacaagtaggttagcccgtatgatatcaaagatcatcagtaggcctttaaagatatttaaaaggcctattgatctgcttttaaggtatagttgataatagagtataggttgacctgcttttactatgtcaactattttgtcgtgagggtgccattcaatacaaggcaagtttcgtgacccgcatcaccacccttggcaacttgacaacaaacccaccccaacaaaaaaatataatcacagaaaaaattaagtcgcattcgtccgccctcatctcaagagctgtgcctgccccccctctgaatccaatcctcaagaggggaacagggtggtataatactaatacaaagagatcccagcagtacatcgcacaatcattaaatcagacaacaacaacaacaacatctaaactcccagcccctccccaaaaggaaaaaacatctaaagcttagccttagtctgcgccttcttaagaataggatccagcttggtagccttcatgacatctcccttgatcttgagcttgccagacatgaacagtctctgcgcattggccttgccggcgacaagagcgccaaagtcggcgtcggagagggagagggtgactatttccacacaccacacacatcaataaacaatccttccaatttttatttttttcaggggtaaacataccagtaggcttctccccaagccccttgccaacagcccccttgttcttaagatcaatgtgccactcgtccgtctcgccagccttgttcttgagcacaaaggcgaaaacggcgttgccggccttgatggcctccttgcggtcggcgtcggaagcagagatggcctggttgatcgcgtcaaaggcggccgaggagggaaatttgtctgtttattgttagcaatccagtgttgttgttgcgacacgacgtcgggtagcgcgggagcaggggattgcgtaccgttggcgagagacatggttgcggtttgtagcggtgataatgatgtatgaaaagttgtgtgaaagtcgcgaggtgagatgatggatgaaagattaaaaacaaaaccaccccgggagagagagagagagagagaaaaggcttataagttgttcggtctttcggcgcacttctagcgcttcctgtctccggatgcgatgacgactgttacatgtgaactcaacctcggcgcattctctttcaggtccaacaagccaagccctcacgcgccatgtggccccaaacgggaatcggacccattaccccacaccaggggatcttggccttgttttcctcctccgtgatcaacactttgctcgcactttcaccagtcattagtgtcgacgacttgaggatgaactgcatgaacccattcccgcggctaggaatttgtgtttgttcccgagtccgttttgcaggcatgtgcctggttgagcagctttgcgtcgagtcaatgtcaggcactacggagtagcgcagcatacgttccaagtttcaaacggcccgttgccaacggtttttgactgtcttttaccacgacatatcttgaccaggagtgagcttttctgagagagatatcgccgatctctgtttatcttgcagcttcgcggtttacaaagtaaaaaagcacgttaagccactgggaggcaacctactaacgaagacacacatcgtcaaatatcaagcccatctcactcaacccacagtccaatcaagtataactcctctaatattgagtcccccgtattacagaaccgacatacatatcaacaccaatcagcaacaatataaatcaaacttctcttattcattgtaccccccaactatcccttccctaaacacacccaaaccttacaacattaacaagtatcccttacaaaaaaaaaagacaaagctctcccagagaataatcaccactccacctcatcagccccaaccaaccacaacccggccacatccttcgccaaccccaacctcaaccttctcataatctccttccccgccgtattcctcccaatcccctccccaaccctccaatcccaccccctcttcacattgccaaccccccttcccccgttcccaccactcaagctcttactcaactcactcaccaccctccccatcccacttcccgcaccagcaagcatcaaattcccccccttgcccttccccaacaaatcctccggcctcccccccttcgccagtccactcccaggcacattccccagcaccaccctcaaaaactcttcacacgcctccttgaccctctcccccaccgcctccaggtcctcaatcgccttgagtatagtgtcaatctgatccatgctcaagaccggctggctagcctgtccaaagatgaacagatttgatattagacggatcagatcacaaacaccagtagcacatccccgagcaaagcaagaaggaagtcttccgagacgatcccatcgcgtgtttgatcgtacagaccgccgcggatgttgtcgtccgaactggcgatcacgctgaccagagcagtggcggcttgctgcttccgtgcaaaggggctgatgtggccagggagggagtccttgttgtctctaatgtcgtagaattgtctgagggaagcataaccgctgagcatcttgccgaggagctcagcaccttccatgtctctggctgcgaggtcctcgagggttttgttcctgtcgttgaggagacgctcgaggtagttgtctagctcctgggcaggagggaaggcgcaggactggatgagggagtaggacagcaaaaggttcatgacctcgcggactttgttagggcggtgagcgagagcgtagtaccacattgcctcgccgtagcgtttcgagtcgcgggcgaggacctcaccaaaagactgcaaacgatgttagcatcagtggcagaccacaaagcaaggcgaaaaaaacatacctcagcggtgtcctcagcataaggaatcatccccaactcattcaacaagctccacagcttatccaccgtcctgctcgagtcaacatgcagcttgtcaatctgctgctgcaccaagtccttcatcaggtcctcgctgtactcggcagagtccatcctccccagcacgtgaatggccagctcccatccatccctggtgactccatgaaccgccaccttggaaagctcctcaaactcggacaaggccctggcgtactgggcaagggtgctatccttgatgccatcaacatcgtccgggctcccaggatcgacacccagcacctccagatcatccatgtccaggtcatcaaacccaaacacgcccaccggtcggtgagctggcagccacttgcccaagctggcaatctcggccagtgcagtcgcgatcggcagcgaccatcccctcagcagcccaataacagccttgacgttatcctcaaagatgcacgccatccccaactcaaccgggttctgactgttgaagtggaaatcactctccaccgccgcgtgaaaggccctccccaacctatccaaataattcccatcctccacccccctatccctcacaaccaaagcctgtgacctccccatctggctccccctaaaccccttcccaccctccccccccttcctctccaccctgctctcatcccaccaccccagcaacccaaccgtagcctccagccagtcctgcgccgcctccataatcgccgccttctcccccagcacaatgtcaaaaacaatattcagattctcataaatctcccacggcactttgctctccgcccgtctcgccatccccccaaaactctctttgttactccccaggctccccccaaattccccctcatcactcccctccgcgaaccgcctcaacaactccaaactcgccctcgccctcaccctaaacagctcccactcccccccataaatctcccaacccccccccacccccggacacccctccaaaacactcaccagctcccccaccgccctgtccacattctccagcgccctctccgtgtaggcatactccctattcacccccctcacagcctcccacccggcattcgccagcagcgccaccgcatcctccaccttccccctcagcaagctcacaaaaaccgcctgccagaacagcccgtggcacgccgggctggggttgtgcgccaaaatctcctccgtctggttctggtacatatcatgatactcctccagccactgaaacatcgtctgcggcagcggctccgccatcccctcctcatatctcgtgtggtggatccgcagcgccagattagccaaatagtttgccttttcaaacgtggtcgcatgcgggccgggccctatctcgaccggatgctcctcgtacggcctcggcagcttgttcgcgtagtccctccacagctccgccacgccgcccgcaacctcggcgaggacgtcgtccatcttctcggggttttccccctcctcgccaacgccctcgtcgtagagcttctcgatgaggttctccgtgttgaggatgatctgtggagtttcattgatttcggcggtgcccatccggctgtaggcatccttggccaaagccgcaaagcggaattcctttggtttggtgaagccgcttggaccgacagacgaccgggcagtagcacggaagatgttctccgcgtccatacgagctctctcggtggcagcgggtgtggcgaacatgagcagatcagactcatcacctacttgggctcgcttagcagcagcagccgcgttcatatccaaccacatgtcggtgtcgccttcgtcatcctcactatcagactctggaacggcgaaacctctagttggcgccgtggttcccgcattgctcgtggtcgtgggggcaacctgagttctcttggcggtaggaagaaccggctcctcgacttcttcagcgatgtcctcttcctctgaagcgaactcctcggccatgacgctgcggctcagtttgctaggtcgtctggtgtggtgctgcccgatggcggatctgcctccgagagatggcttgggagcagcacctccaaacaatggctttgggggagcctgaggctgcttgggagcagcaaacatgtttgaggatggggcctggggctttggctgtgcgaagagactggcggggggcttttcttgatattggtttgcaaataggctcgagggtggtttctcctgagcctggttggcaaatagactagagggcggcttctcctgtgactggttcgcaaaaagactcgcaggaggcttgtcctgagctggcttcgcaaataggctggcaggaggcttatcctgaggaggccgtgaaaacaagctagaagctggcttctcctggctcggtggtggttgcgagaaaaggctcgaaggcggcttctcctgcggttttgtcccaaataaattatccgatttgctcgtaaagagaccagacggagccttagtctcctttgcctcttgcccaaacgaacccgaaggggccttatcggcagctggcttggcaaagagactggaaggtggctcctcctgagctttctcctcctgcgggttcgtcgaaaataaccctcccgtcgaaggctttacctggcccgtgttagtgttaaacatgccccctccattcccaaagagccccgacaccggcttatccgtcgtcgtcgtcgtcgtcgtctgcgaaaacaacccaccctnnnnnnnnnnnnnnnnnnnnnnnnnnnnnnnnnnnnnnnnnnnnnnnnnnnnnnnnnnnnnnnnnnnnnnnnnnnnnnnnnnnnnnnnnnnnnnnnnnnnnnnnnnnnnnnnnnnnnnnnnnnnnnnnnnnnnnnnnnnnnnnnttcccggagtcttgtacagcgaagcttcaaccaccaccaccaccacccaaccccttcacctcaggcgtcttatcccccccaatactactcccaaagctcagactaaaatcattcttcttctctttgttatcccccccaccaccagtaaacaacccccttcccccccctcccataaccgaactagccatatacctcggctgccccgccggcgtaaaactacccgcagtatcaatcccgctactagcaaactcaggatgttcctccttgaatttaccaccaaaaccaccaccgcccgcgttgtttgaagaaacagactccccaaacagactatccccaaaactcgaaaaattctttttattcacccgagcgttggggctcccaggcggggaggacgactctgggaggcggaagcccgacatggtagctagttgtcgggcgggtgcttcccttgtcaaattgtgatgcggtgattcgggggtggtgttgataaagaagtcgtgatcgagtagaagtcggtttgtattttgcgatggaacgatgtcgctcgcgcaagtcgcaatgttacgtttgttgagcttttcctatgatgaaagtcgactcaattttcgtcgtgaaaataaatcgactcgtatctcaattgtcgccgctgacaaaaagaaaaagaaaagaaaggtatcgcgacaaaagtcgggtcggggtcggcgattggttgttgtttatggttgaagaaagatggaaagctaccccaaatggttacagcagggagaaagcttcagcacgcacttcttacttccaagccagtggtctggggcacggacccaacccgacgcgacttttttgcccagggcagcagcagccagcgcgcctcgctcatcagccggcaagttccgcaccactttttggcttcaccacttcttggcattatcaactcctcctcaacatcaaacatcttctccagaatgtatattctcgctataatgctaatctctctctctttctccctccctctctctctctctctctctctttcaaaaaaaaaaaaggtatcaactttctcccattcgtacacttgtgccccagccctcccccacatttcatcaaatattatatttacatcccattcccatccatcccatcacatcacaacctctctctcctagcgcttcgtcacccagaaacctcatattacacatcaccaaaaatacacacccacatgaaaaagacatgccacaaacataacaagagacgacgcaaacaggcttccaaaggacatgatagaatactgcaaatcggccgtcacaaaaaaaacttggcacaaaattctcctcttccttgacccccaactcctgcgtcaagaccatcccaaacactcgcacccccctcattgttatcatatcatgtatcactctttcgctaacctcaacaaaagaaaatctccctcaggcgcaatcgatcgtttgaccgtgggtattttgggcaaagcactttgtaaaaacatgcgccgccgcgacggcagcgagtgaaactgatgcgggctcagtcgtctcccaagctccaactaggcactctggggcactgaatccttttctgaaccgaagctggcaaaccttcccggcgcgcgggcactgtcgggatggggttgcaagccaaactttcccatgccggaaactccactgtctgcctcgctgtaggtgattccgagaccattcttttccttgtcggccgctcgtttctcggcctcgccgttctccccgttgttgcgagcgttctcgtccaggcccatgagtgctggtggtctgtgacgcatctgccgcgccttggccagtgagatcgtcttttgctggtatgtcgtcgttatgggctgcgtgtcgtcgcgatcgatggtggccttcatgagagcggccatccacagccggccctgcttgatgttgggtaccgcaaaataatggacggttggcttggtgaaagtaaccgcgcgggagagaccagcgcgaggtggtacaagcttgaaaataaagatcgaatctgggccctcggaagttggatcacgctctgcatcactggcggcaagagtgtgaatctggcttccggcgggaatggctggcgagttggtagcaccggtcaaggtagcgtggagcccggtgagcttctcgttatcggcaggcagaacgcggtggaatgaaatatcgatcaggcccttctcctggtcatcgtcctccgagtagtagtacgcgagacgtctccccttgagaacaaacagacgaggcttccaggtcgtcatgagattggcgctccgcttcttcatccagccgctgtaatcagcagtcttcatggcctcctgcggcgtaatcttttgcagaccacgagtgtacgcgctcgtctccttcttggtcttcttgcggctgccgcggcttgcttgtgtcgtggccgtgctaggactcttggtggcatcggcagagtccatctcgaagctcgggccaaccgaaggggtactagatcctgtccgggctggcgagtacattggcgagtccttgagcggtgaatccagaggtgacagtttcgccttttcgtttcctgtgatggcatccgaagctgccctcaaccctcccaacccgctgcgcagcatcatgctgacgttaaagtcggggtggttgacttggctgaggcgcttcatggcgttgacggattttggcgatgatcgagatgcttctgacgtattgctgtcgagccgggtgacggtggggttcatggactccttcaagctccccgaagtttggcgcatcgaatcggtggttattgtcgaaggtgtgcgcttgttcaggccataatacttttgggcggcagccgacacggatgattcgcgcaccgagtccacactcccaaaccttgagtgcctagacaaggcggttgcgctcctgacacgctgctcttcggcgtagctcgtcttgggtgaggtgcgtccagcctgcacactgtcgcgcttcttgagcacatttctcttccgggggtcggcgtcggtgccggaaaagtaaccacggtccaggtcgactgctgaatcttgcagttctgctccgggctccgaagactctcggacgccggccgaggacagaggtctttgctggaaagacgacgacgaagtagcgccacccaacgtccagtttctatcaaaggacggttgcttcttatgggccgtctgctgttggggaaacgtgctggtggaggcaggtttggtgggtgcaccggtagggcccgcgatccggaaatccgtcgacgagtggcggcgcgagtgatgcaaatctcggattgacgcagcagaggggcgtttgtcgtggtacgtgcggccgggcgaatctaccaagggcgatacgggtgatacgggctcatacggctcaatcttgggtgtttgtgacaaacgtcgcgcatggggcgacatgttggactcctgggttgaattgtaccgctgtggccccgagctcgtgatggtgttggtcctgcttcgcatcctccctacatcagacccggcctcgctcccgtatgtctgagttgtcctccctgtgctcgtccccaaaccgttggcttcgtcctggagctgcttgatcttttgccacgtcttgagccgccttcctaccgagcccaagtcgagggccttgatgaataccgaggtctgatccattcccaaaagcacctctcccgtgatttcctggtcccgaaatacctcgcagtggtgcttctcgacaccaaccgtgaacaaatattcagcgacctgatctgcgttccacgattcgacctcgaatcgagagtgcaccgtctcttcctcttcgtctgtttcctcgccctggatatacgagatgcggtggccgacgtgagagctgtactcgctgcccgaatcattagccctgtgcccctggccgccatcgggggatctcaggtcggtgatgtgttcgttgatgacattgagtgtttcgtgcaaaacatagctgtcggtgctagcgttgggccgtatcgagtccaggccagatgctgcgccggtcggcagactgctagagaacggaggagggcttatcgtagggggagcaagcgtattcagcgagctcggtgggagctgagcgggtattggcttcggtgcgctttttgtatcctctgcagggtgggctaggggcgtcgcatgctcgttatcttcggctaggggggtcagtggtggcttcgatgcgttagaaaacgatgtgttggttgtgacgacagctttcggtgctggtcgggtgtagactgttgacacgtcagcctgagttttgcgaaaccaggctctcccttctcgacctaccctcagggaacaagccgctgttgttgttgaccaaatgtcggcccaagtaccatccatcgccaaactcgtcgtcgcgctcgagcagctccacgcgctcgccctttaccaagctcaactcgtcagaactgcgggctacaaagtcgtctgtatcgcgagagagtcagcgatggttctatataccttggttcaggggcaggcatggcatacggatgacaagcagaatgtcgccaatctcgggcttcgcattgtgagccgccattgtgcgtaccgggggtggcagcccgatcgctgcgcgcgttgcggttgcgtgtaggtgctgaagagcaaatgttcaaaagcgacgacggcccaaaaaacacaaaccccggagaaaaagaaaggcgtcagagtcggcgctgaaggaggggcggcagtcgagaactgaaaaatcacgggcgggatgccccgaaataaaggtcgagtagtaagtaggggacctggggggtggtgacctccaagacctcttggaaggtgggcggcggccaaatgaggccggctggagccaggctgccgtagaatccaatgcagtggcagtacagcagatcacagagatcacagatatgcggtgttcttagcaacgccgtggtctttcggcatccatgatctcttgttgttaaactcttctatttcggtggcggtacctatatgtgtaggtcccgtctccggagtagaagaccacgtattgggagagggggagggtggtaggtatcgggctgaagcgtcggcggcgtggatgcaggttccgagatctgattgggggagaagcaattaaacgggcgcaaaaggttgggcagagtgtgggcttcttccagaccttctgccggggggggcacagcgcacgccgacggaggaccaagcggcgggaggggtgaacagaagtgtaccagaagtatcagagccagagaagctgtgacggttggcttccgatgatgacagatgacaattcaagaacttgagcaagcaaaagaaaaaggtacgtccgtacagataaccaaatggaccaggggaaggggcgacagcgagatgctcccgcagtccacaaaaaagccgccaagactaacgtagcgctcgcaatggatgggtaattcttttggcagtagcgccgctcccgttacgacgtttacggtgtacctactgtgtatggtcttacaattaaatctatctggcacagtctttttgttgagatattagtacagatggtcacattcccggcctcctaccgcagcaacagtttgtgtcacccaaaccctctctcttccttgaatgtttgtctcttcataggtgtcaggaccttttctctcaagaggaagcgccacccttggcggaccgttctctcccgccgtcacagtcgcccgccagcattacagcatgccttttccctgttgagcatgcagtgtgcaggattgcagcagaaacacgtgtgtggggacaggggttcttagagtgggctacgaaaggtccattcaatcatacatatatatctcgaactcgaaaccagactgatgtggttcctgtatggatcattatcacagctcttcagtaatatgcgaatgactcggacagccaaaaccggaacttgtcacacaatgccaaagatcgacttacgagtctctacttcttaccggcctctttggtggtcacaacgtcaaagccgccaagcttcagcctcaagcgcgaccaaagattccgagttgacaggatgcatgccgagctgacagtcagtcagcctcgacctctccaagtgtttcaaagatcttcacatttcacatgtttgttatcaaaatcgagggtctcattttgtggagacatttcacaacacaccccgctgaagcccagttgcgggccttgacctcttagcgaccggttaatgaaccccagattcggcgccggcccagcttcccgtctttggggtagctccctcacctgtggtagacgaaccccgagctgtccgtcttccgtgtgccgaggcatcttttgtcttggggccagtctggtgatgtagtctccgtatgccatcatagctgacagctacaattcattgacgtttctcatcaaacaacgacactatttgcggcaccgaactgaatcatcttacttctctgctgttattccatttcatcgcgccgcccacttacaccccgggtccatcaccaccacttccagctcacccagcactgaccaccaccccaaccaccaaaaatgtccttcacagagcaatacgccaaataccagtacttcctcacctcctccccggccccttatgtagcccacgtccaaatcaaccgcacctccaagctcaacgccttcaaagaggccatgtggctcgagctccgcaccctcttccagcaactctcatccgaccccgaagtccgcgccgtcgtcctgtcgggagccggcgacaaggccttcaccgccggcctcgacgtgacggaagccagccagaacgggctgttgaacccggacgggaacctagacggcgcgagaaaggcggcgaggctgcggagacacattgccgagtttcaagagtgcatttcggcggtggagaagtgtgagaagcgtgagtttccctcttcatcgacatgaattgggcatgatattgacaacaggtacatagctgtcattgccgttctgcacggcatcagcattggtctcgcgattgacatcgcctgctgcgccgacgtcagaatcgctgctgccaacacacggttcgcggtgaaagaggttgacatcgggctcgcggctgatatcggcacgcttgcgcggctgccaaaggtggtggggagcttctcttgggtgaaggatatcgcgctgagcgctagggatttcggggccgaggaggcgttgagggttgggtttgtcagtcaggtgcacgagtcaaaggacaaggcggtcgaggcggcggtgaagatggcggcgtttatcggggggaagagtccagtggcggtgcaggggactaaggaggtgttgaatcattcgagggatcacgctgtggaggagaacttgaggtatgtgggcatctggaacgcggcggcgctgcagacgaatgatgtgcaggctgcgctgctgtcggggatgcagaagaggaagcctacttttgagaagctctaggtgttttctgggggatgcaaataataagatttcaattgccccaaaactccgtgctatgccagttgctatgtagctatcctgtccggcatatcttacatgcccttatcctcatcactgtcatccaaaggcacctcaacacggtaagtctccttgagtttctgttgcgaatcatcagtgttcacagtcttgtaacgtggataataaaaataaaataaaagaactcacctcatctaaccgggcctgcagggtcttaaccatttgctccttcaccatcagatgagtctcgtcaaggtcctcgatgatggcgtcgttgttgagctgggtgctgtcgatgtggatgaggatggacttgatggctggctcgcactcgatgaggacgccgcggatggctcttggcattttggcggttggatgtcgatgtgaggcgtggcagtagtgagatggatgaaggtattgtcaactgttctgattctgatgagtggttagtatatcaaggtgaggatgagagcaatgaatgagcgagcgatgaaactggtcgatgaacagaaatgatgatgtataagcaccatcacagatgagcaatacactgacagagatatcatctgccctaactctaccaaaatacaggccccggttcatctctacctcatctccaacaaatcaaagcccgttgctgctcacctttttgcctgccggtacaatcacgatgacgaactggtggtgttggttgaaagcgggactgcaacagcagcgggtaaaaaacgccccaacatgctaaaaatggggcgctgcaagggcactgtgaaaccaaagatctcccccaccaacccaaaccctcggggttagcagtgcaccactcggattctgctctattttccaccaccaatgaccatctcactcttacacagaacctcaccccaagcggcgcaagcaaacaagccttgccatcagacccaaagctgcgccccctcgcctctcgcagcaacagcagatctgccagtttcaaacccaagctttttacctcagtctgacccaaccgcgactcctgacagtgcctgtgttggaggcgctggcgttgaaaggatgcaatgcgagctattctcaggttgaagcctcacctcaaggtgggaaacataagttcagacaaaatggcggttgacccttccccccccccccgaatctgacctccgggatctgaaatgtttatgatttgtctttttaaacactttctaccactgatcgatcatagcaagaggttacaatgtattcactcaagcaatcctccctcctcaccttcctcacttcaggcctcaccatcctcgccgcaccccaagtcactccaccaccacccatcccatcaatcgccgtcccacaaccacacccagtcccaaccctcccagtaccacaaccacttcctctcccaacagctccaaacccaggtcttatcccaaccccaagaccgaaccctaaccccgacaacgacgacgacgacgacgaccaacctcaggatgaaccctcaaccaccatcaccaccccagcaacaaacccctgcctaacctccctctccgccctcttatcaggtttcccctccccctccagttccgaaaaccccctcttccccccctgggcctcctcctcccccccaccaatcctgatcatctcctccgccctatcaagcaaccaatccttctcccccgagctaggcctaggcgactcaacagacgagatgtgcttctccgccgtggcagccatcaccccttcccctactgaactagcagcagcctattctgcctatctggacgatgtccagatgtggagatttgctgttgaaggagaggcgtacaggctggcggagaagtgtggagggggggtggggttnnnnnnnnnnnnnnnnnnnnnnnnnnngggggggagaaaatgagggggggggttatgggggggatgttggggttggttgcggtggggatggtgatgctttaggggatggtgatgctttaggggggcgttgaagagataaaaaacaaaaaagagaaagggttgcgtggaaagttgcttgaaaggggaagtgatacttactgctgtgccattgggtaggttgtttgtgttactttattgtttagttgtcgtatacccgggagtgtatttggtgttttgattggatagactggaatgttggacatgggtcgagatagaggcgaactcttcggaaacggcaaataatacaatctactattgattttgaacacgacgatgcctgttccggcgtgattgggaattgtctgtgcggatgcgtgatgcaatgggagaggtttacacagtagtgtcacagcattggcgtcatcaggggacagcacaccgagcttgggtggaagacacgatgctatctgggatatatatcctggtcgttcaggttctagaacgtgaggatccaagacgtgcgttatgtgtgtggttcgatccggcaagcaggggccggtcagcttctgtgcaagcactcggtgttagcggggtgggtgtgtttcggtagcaaagcttcttgaactctaccttaggtatctcaacccagcttcttctttgtgttttgttttgctctcttgatgtcatatcatgacatgttgcaacagggatagcattaaaacaacatgcgttctcagtctcgaacagtctcttcatcatctgtcatgatatattcccccccccccccccaatgggcatcggcacttccacccactctaacacaagctgcatgcagcagctctcaccacatacctcgcactaaggtagttaggtactaccagtctgcaaacggggctgcatctcaccagtcttagcaccatcaacatgcccgacaaccgttgaaagcctgagcaccgaggaccgattgaaactttgtttttgtggttcttttctctccgtgctctttgttgttggtgttgttgttgttattgttgttgttgttgtatctttttttgcttttccaacacatatgtaatccactccccctggttcactaataacccatctcacatacctctctgttcctgctgtgtgaagaagaatagaagacgagagtgaaaggcctgttggggctctttctttattctttccactcgtttatttatttttttcccctcgcagtattgttatttcacacgactttcacctcctatcttactttaccctccctcgctggttttaacggtggtggtggtggtagtggtggtggtagtggtggcggtagtggtagtggtgtgtcgtcataatcctgcccgttaggaggagagccgttgacggatgaacctccctccccttcctgctcatagccgcggggactcacatcaacccacctaccttaccagcccgttggtacccgttatccggtgctttcaatgacatcccccttcgcaacaatgacctccttcggaggtcccccgggcttcattccccccttttgctcctccccaacctcaccaccatcatcctcatcctccaacgatgacgacgggttgttttccgctgatcatnnnnnnnnnnnnnnnnnnnntttcccccccccccccccccctttttttttatattaccctcatggttgctaactctcccagggcatgggtcctaatcccagtagccctcctctcaaccctaggcctcctagcagcctgcctccacaactcccgccgccgccgcgccgcccgcaaacaagcagccacaaccctgctacttaaccacccacgtcgtcccggccccccagactcaacccaggttacgatccgggatcttgaatcagggtgggtgattcccggacgggaggcagcaaggtgggcttggcctcctccggcgatgagagaggaggggttgaatgaacttggggaggcgccgccgccgtatgagaatcataaggagaaggcggcggcggcggcggcggtggagctgggtggggaaggggaggtgagggagattggggaggggagcagtacacagattgggctgatggagttggatgggagggaggtggtggtgagggaggagaggagttgggttgagggggtggatgatgagattgatactaggagggttgggcctgatggggaggatggggaggtggataaggaggggaggggttctgacggtgggagtgaggatgaggaggaaagggggcacagagaaaggaaaagggaaagggaaagggaaagggggagtagcagcactgatcgtgcgtatgatgttgcggaggaggtaattatcacgcagccacctccggcggtgctacgggagactgacagtgggaggcagcagcaacgggtggatgatgggaaggggaagaaagtgtgatgctgcgtagagctggttggttttgcagatcatttgtttgggattacacaagtggtcatggaatcaaaccaaaagggaaagaaaaaaaaacctgccttcatttttgaacattccaaaccatgcaatttctatatcaagttgctctcatgtcatgccaccccgtcatcctttatatgttttcccccccatcacagcctctgaccacccctagtctcaaccctcaacccaaccacggccccaaaagcagccagtatcaaaacccccgccaccatcaccggcccgtcattccctttctctccatcactccccatcctcgccgccacaaccggcgccagcaagcccatgaccctattcaaaaaactagccacccccaccgccgaccccctcaccggcgcagggaatatctccggggtgtacgcatacagcaccccatacatgatattctgactaaaagcctccacgcagctaaacaccacccttaacacctcgtttctcccccaccgaacaaacgcgaacagacccaccgccgacacgagcgttgaggtcgccagtgtccctttccgtccaccgaggaacgggagaggggagtcaacgaggtggtaagccagtacagaccccgggatgccggtgagggagtagaggattatggatgtgtacactgatgatgatgatgatgagtccggtgaagagtgggatagatactgcggtaaaaacgcattaaacaacgggtatcccatccctatcgtcgcccaggtgagccagatcaggcatgtcgttgcgcccaagcggcgggttgcaaacaatggtttgagacgggaggtggagaggaggtgggatctgactatcgcgagcgttgacagccggtgtggttggtgaggatggccggttgacccgcggtggccgtcatcagcaacaacatccaaaagctcctccgtcaaccacgtcttcctcccattccgaaacgcaatcccatgcaccaccttcaccgcctccccttgtctcccttgagagagcaaaaacttgggtgattccaacaggtcgaaaatgaagaatctcgtgacaaacatgccaaaggtgatgaccccgatgctaaaaacaaagcaccgccacccctcgtcgacaggccagtgagcaataaaaaaccaggcggctatcgaggagaatagctggcctattggccaccagaccgacagcagggtcaacagcgagcttgaggcgtcggggaggaattcgagaaatagtgcgccgtcgacagggaggttaccccctaccccgaaaccgagggccgcatacgtcaagcagacggccggccaggtcggtgcccaggccgaggcgatgccaaagagggaggtgatgagaagcgtggcgttgaaggcgatgcggcggccgatgatgtcggacccaatcccccagacgaagctgcctaggcagaggccgatgaagagggaggaggtggtgtaccggatgtcggcttcagaaacaccaaactcggcagagagggaggggagggtgagggcgatcccctggaaggtgtcagtattaacctctttcgggagtggcggaaacagttgtgagatacctgcatccataaactaccatcccgtcagcactctcccgtttcatcatcttatgtgtagtaaagaactcacttatcagcaaaccacccaaacccacagagcacaaacaactgccagttgtacctccccatcccgatgtcctgtatagctttgttcaccagcctagatttcactttttttttctttttcttcagcaaccttctcactttccccccctctcaagttcactcactctcatattcccccctcccagctgccgtccttttcccaccaccagccctgacctcacgtctcaagctcccaatcgtgtactccctctcagcagccgtcatgcccagtagttccccagaagagctgcttcgtcggagtaacatgcctgttccttcatcacgaccaccaccaccctctaggtcatcatcatcataatcatcatcatcgttatcatcatcatcgttatcatcatcatctttttgggtatcctcagtggtgtcatccgtggaagtgagtcttgaccggtaagaatgactgtgtaaatgcgcctctgacagtggaataaggacattatcgatggtgttgatcaccacgccgggtggtagtggtggtgaggggtccaggaaaagcgttgagattgtgcgtagcattttcttgaggttgttgttgttgttgttgttgctcccaaaaaaggggggggttgtgaggtgaggcgggtaccgtttactgaacgaaacatgcacggtgtgctctgtagcttcagaaatttgaccgccaatctgaaggatcagaaaagggggttttgccgagtcaggagaaaggggctaaactgagatatcagattgtcaaaaggtgtgaggaaacaatatttcgaggctggagttgaggcttgaggcggctgggcttgaagctgtgctgtggtgaaccaagaacgtccttgtgaccgtttctcgaaccgttccagaaagcgacagggcggggccggatcggatccgctgtgggtagggttggtgcagaaatgtgtaggccaagaaactcactcactcaccactcactctcaccaaaacctcagcaacatcaaaactgccatttcatcacatcactgcaccaaggtagtagatcgttcagcggtgaaaatgaactcaagcccccaaatgaagaccctctccccaaattctgtgcaacgtcgggtgattttgatgctttgcgacagctcagttcttttccgcactgtggcactgtgtccagtagaccaccgacggaacacacgtccctggattccgccagtgtggaagttgggagcttttcccatgcgaacagcaatgaaacactaccagcagctcaccttcattgcataagatacttccagccgggcactccaatccacccgacattccgggtcgccatccatctttcggtgagagaaacacgtggatcttaaacccacctatccatagttgggggccaatatggcatgctgaaccgctgtgaaccgtcaccagcccacagcaaatggcgccaagttccgacaagctcgcatgatatcgttttgtaatccgaaaaagaaacagctaaagagacccctaagtgttatcccatcagatgtcttgaaatggcggcgaaaaacagttcagctgtgacatctgatccctcctgcgctcgagggaagcgatccccaccaatccgccccagcctaaccatttatcccccaagctacgccgtcgtcccatacccaaaactgtgacttttacccctgaccaatgttgaccccactctgcctcctcctctcctacccacccgtggtagcaatttcgagtttgaggatgagtgctgagcaaccatgacaatcccacccgcatttcgagtgtcactccccccttttattctccctcgtgtcgtgcgcgttcgatattttccattctctagcgactgcaagactgcgaagttgaagtgacccgcgtgctgtatgctgttctattggaagtgcgggttcgaggcccggattatatactgcgtccccgatagcaaataccctccattctaccctgtcatgatctgggagcgtcatattcctccccgtattacattattattcttctctgtgcacctgtccaagttctctaacccttgcatcctaatcctatttccgcttcttgaacacaagttgagcaccatcctagcacaatcagcatcgtatcaacataagcatcaggatagcaacacttaccatggggaacagggtggcaaacaccttgatctcctcggacctaggcgtcgcatggtgcgtccagtctagctccaacgacgccttgccaatcatgcccgcaaaagacatgggcacatatctcctcgcaagacagtcgtgagggccagccccaaacaccaaccagttcttggtcttcgtctcggcatcgcccgtgatccacctgtcagggtcaaaatactcggggttggggtacaccgctgggtcgtggagtgccgggtagcacgaggggatgatcatggaccccttgggaaccgtgtagtcaggtgtgaccggaaagtccttgagagccaggtaggggacaaaaatgacgggcggtctccagcggagcagctccttgacgaccgcgttggtgtaggtgagtgattcgatcatttcgaggtcaaaaggcttggtcctgtcacccccgcgcgcagccaggttttcctcccgcaccttgtcgagcacatccggtcgttgagcaagaatctggaacatccaagtggtggcgctgctcgaggcatcctgtgaagcgaagaggaaggtgaacagagtctccgagatctccatgttggtgaactcgcggatcaagttcgccggcttctccactccttcttccccggcggcaattctttcgcggtatctgttggactcgagcatgttgaggacccaatggtcaatggtgcagatcggggcggcaccggtggccatgttcttcttgcaggcaccagcagcgcgtgcaaactcctcgtgaacctcatcggccaccttcttgccgatccattgcttggtaaacgggatgtacatggaaaagggaacattgaccagctccatggcagcagtgaccttgtaaaagtcgtcggcgattcgcttgacagcgtcctcggagatgtagtcgccgaagaaggtgcgcagagaaagggcgcattggatttcgcgaaacgacgtcatgaaagccgttggcttgccgttgttggcttcgctgatggccacaaacctgtcgaaatactcgcccagcaccttttcttggactggcaggtaagtcgacagggccttgctggtaaacaaaggcgccagtccccgacgaaactcgacatggaccttgccggtgaggaaaacccaggccttgtggctcaggaggtcctttgcaatggggacaatgcatggctcggtatactggggcgacttgaatactttgtgggcgagatcgcggtcggaagcaaggacaacgaatctggggcaaaagtgtgtcagcgttggggttagcaatgacaaaagaaacaaaaaaaacatacttgtggaagacggaaacacagctgaggggcccgcttgcccactgggccagataaccgtcgaatttggggtcgagggcctgcaagaagggtcccatgaagggaatcttgaagctggggccagcaatggatcctttgcgataaatgtacatgacctggtcgtagaccaccagaccgagaaaaatggtcaccacatattgccaagtctcccaccctttgaggcagctcgttgcaagcccaatgaccgatgatggcttcaggttatgaatcagcttctcaggctggccatacgaggaggaattgacagggtcagccatgttgccggtggtgttgctggaggaagtcccagttggttggtgggggcaaagtgcgggttcgggggaaaaccttcagggaaaatagaagaaaagattaatgggcgcgccatgttcatttattatatgcggacggacatccgcggcagtcaaaataacagcagcttaatcacaaccgtccccctcgaaagaaacaaacggcggctccaaattggaaggcaggaacgttgtgcttcgactttgcgaactgtgaaaggaggagcgaggtgtccaaaagaggactagtctccgaatgttgcacatgccaagccggacgctatctcaccctccttggccgacgtttggctgaacagttcggtgagctgcgcactgtgtcggcggcgtctagtcctcttttggaattctgctggtcagtatatacgcgggaagtcgcgggggacattgcacacattgcatgctgaccaaaccacagacagatattttcgaaccgcctgggatctctcttctcttttttgattgctcaattcccccgttcgacttgccctgcctctcacaaccatgcgccacacgctccggcggtcgtgctctgcatgcgcaaagtccaaacacagctgtgatcttggcactccccgctgctcccgctgtgtcaaacgcaaggtccagtgtttgtatgcaaatgaacccttgactgcccctcaaaagaagacaatcatcctcccccttggcaccaggttctcgtctgttgatcctttcgagtcctacccgcagaccagactgccccgaggccacgtccagcgtctcattcacagctttctccacaagattgcctttcaatactaccctctggatctcagcccaacctcgaacccctttctggtgtcttggtggccccaagcgctcggtgatccagccctgtttcacgtctcactacagacggcatgcctcgacgaggagctgctggcccagagggggtttcaggcttcgacggtgctcatggctgattcagtggcattgctgcgccgaaaggtcgaagactcggctcttgcagtccaagacgggaccatgaactctgttatcacgctggcggctatcgaggtgagccattgccatcacttgtatgggcctattggctaattgccctggccagtttgggaaaggcaacacgagggttagtgagatgcatgtggctggagtcaagagactggtcgacctacgaggcggcatcagctttgtaaggcgaacgagtccacttacagcgaggatggtcagttggtgagtttttctcttcatcacccacagcacatcgtacctctaactctgccagggtatcactgctcgtcatgggccatccacaattcgacactcaagacgacgccggcattggagacggcatacctccaataccagaatggcggctggacttgcccattctcgaggaccaacttggcaacctcaatatcgaccatcccgtcaagaacgttctcacacgccttcgctgcgtttttgaacgggcacaatccgccccattccccaacacacgactgcacgacctcacatgctttgcagtacaccgtctcttgctcaccgccgctggggcccatgtatcatcgcccgcgaccgagtgcatccgttacggcattgttctctacatgttcatcatccaggggccaacctacttctcccacgccgcgctcatgaacaaactagtcaccaacctgaggcaacacctcgagcagcagcaattcgagttcgcagcacaccaagacgtcaacgtctggcttgccgcagtcgggctggtagcctccgccaacaacacggctcactacgagtggttcgccgaacgagcacgggcggcatcagcttcgttgcaattacgcagctggaccgacacactatcttgcatcaagagggtgctctggctcgagagggtacacagcgaaggcattttccgaccacattgggacatgttttttatatcaagccacaatgacgtgaccactacagatatcagccagccgacaacgccccgttcactagtagcgatacggtcactgccaaggggatcaccgccagggaaaaagcagagcggtgttgtgactagcagtatggatgtcataggttttgggtagacatttgggctttaatgaagagaaaaaaaaaaaccgtatgaccctactactagtttcatgctgcttgaaaaaactttaaatttgacatatgtaggataaggtaatatctatctagtggtatccctatatcgatcagttgttttgaaaacccctcaccacgcaccccccccccccccaatcccattttcaaccagacgccagcggcaccctactcgccctactaccatcccccatctcaacctcccacctcccttccttctctcccctaaccctaaccacgacctccacatcccgcttgggatttaaaacagtaaccggatcagcaaactccaactccggcttctcctcccactctgtcccctcagcagggtggatatcagtcctgacaaccagcatagccaccaaaatcaatatctccgtcgcggcgaactgcctcgcaggacagagatgcggcggggcgccccaagcaagaaaatccgcaccgccccttttgagatttggatccatgaaccgctcaggaacgaaatctcgagcggtcgggccgtaggtggattgggagtagtggattgcgtggcctggcatctggaggtagttcccttccttcagcaaaaccttgccgctgtccaaaagagtgttggttgtgactttccggatggcggcgtggatgtgtcttgtccgttgggtttcttgaaaggtggagaggaggagcgggcacgaggttttgaggttggtcaggttgaggatgtgacgagggccggaggtggtgatggcaaaagtgaggatttcggagcggatcgaggacaaaagagcaggccgggaaaaaatctcgtagatggtccagaaaaaggtcgggactgtgttggagagcattcctattgggagtgtggcttgttgtttggaggcttctgacacggaaaggccagaggagaggaggcactgccagcgggagaggaagagggaggaggtgtccggggggatggaggtgcagtattttgcgtgggcggcaaagacgacggctcgggcatggtagccgtgggagaggatgtcaaaattgattcctgagatgtgggctgataggtgggcgtgccaggccctgggggggggaggatgtcagcaagggttgacgagggagggagaaggggggggggttaggtgtgtaccaaaaagcttcataaaccttgtcatcgagaaacgggtgttgattcccataaacaccacagctactcgcctgcgtgatagcaaacctcgcccactcgagcagtttgatttttttatctttcccatccccaagcaagagatccaaatcaaccagtgcccgttgtgccatcctcatattcatctcatccagctgcggcccgggagccagactcgtcttcatgacatggctaaactcagtaatgagatcagtctcacgaaacaacctgtcagtctcatcatttgcgtcaccccattttctagccaccgtctggatcattggccggaacgaaagggccctgctctggcgttggatcaacggcagcagccgggtggacacggaggtgtagagtttgtaattgaggatcccgagcgtgtaaatctcggtggtttcatcattgcggatgacgctgtggtaggaaggaccgctgacgatgatgccgatgaggtgtccaatcagcggtatcctcgcccgcaggcggggaggttcctttgggtcgtcgttccaggcgagcaggtaatctgctagataagcgagcgagaccacggcgaggagagcgtagagtatggttgtaatcatgttgatcatgttgatcgtcgttgcacggcaggacacaacacacgcccaccgggaaagagaagtcttactggaacgagaggacgggaaccacaaagaagcttgacagctagctgagtgtaactgcctgtccgtgtatcccaacctacctttgaagagggatcaggattgactgaccgctcgagcccacatacatgtgtgtcccggaccagttcctcacatggaggggctcgaaaatcaaacattggatgcccgaggataacatgctccccgcctcgctgcggcacagcagctattggcaatttggcccccccctctccatcatcaaccaaggcagtcccatcgcttgcatgacccaagacagcaagagcatgacatgactgcagatagcaaaaacctgcctgcctttttcttttccatccacacttcgctaagctcgcccaaatcctgaggtccacatataagtaagaccgagaacgagcagcggagtccgtggaatccttcaaaagcttctcccagcttggctttgtgcagaaattccgtacgcaagcgcttacactgggaaccggatccaaccctggagacgcgggggaacatccgttttggccaagccagcaacctggaaagttccggatatatcctgcgtatcatagagcctcttcctcccacgattggtgacaccacactggggacttgattcctcatggcccataaacaaggtcggtgggggcgacgattccctttattcccattaagccgagcgtcaacaagctgataagccagtatccctacgtgttttcggactgtgttcctgtaatgccacgttctcattgaaggccttgtcccgcatagattgctgtgccgcgggctgtgcctgcgttatttgatttttatatcaaattcccagtgcgaccttgacgttgatggatgcacacaaaaagcccacacacggatatacaaaggtatgtaggtcctcgctcgttccccacttaccgtaagatcttctttattagtgtggtttgctctagacatcgtccctcggggagggttccctgatgaagaaagagctcgtacgtacagtacactacacaaccaaatgaggggctgcgccgtaggatctagacacttatgcacattgccaatagtcctggccagaaaggtttggggttgcggccgctttatgcagccatgtccgcggctggaaggcacacagaagctggcagtgtttgtggtgctccgtcgatgtcgaactttggctcgatctgcgtcaactgaccgagctcatgggaatgagcataaacccacgaggtgtgacacccggttgatgggtatcacagcattcacctgaaagcttgtgttagtgatcgtggtaggctgtgtagctaggtcaggtcgctgagcatgcaaaagagtggcaggcaatgccaggtgggggataagtaggtgatatgcaagagattcaagtataaactcggtgttggcgtcaaagcttgtggtggttgggtgttagctacgtgcagaacaccgcatcgagagctcgccatatgcaacgtcccagcatccggcaatgtagaaatatatccaaatccgtattacaggatggatggttgaagcgggaagcggcgtggcacatgcaaacgtgcaatgtcaccactcccacgaggtcgagaggacagtccgaaacgaggggtgtgtgttgcagcagactgagccgcacatgcaccgataggtgtgtggattctccatctcgccgtcgccttgcttcgcaccagtaaatagaagcacatggctcgggtcatccagctgctgtgactgataggcggaaacaggtcggcggatgcgcccggggttctcgtgggccttattccgggctgcaaagagtgttgttggatgacatgattgctatgctccggcgggagaatctggtgtgagccatggtgccacctgcctccttttaaacataaatttcggccccttcggaagtgtctcgttcctttccaaccctgacatcttcttgccgggcaaatcgtcagcaccatggatatcgtcaacaggtccttcgccagtgtactcccagagggtagatcactgcccaccgggggcattgactcctccaccttccaattctcatcttccattgcaactgccatcctctgtggcctcacactctggtactggtgggcaatcaccaaggcaaaggcctcccgggacttcatcgacggcaattacaacttcgatgcccccatcatcggtcccaaaaatgctgtcctgggccgtctagccttcttccgcaatggcccaaagtacatcgccgagggctatgccaagtacaaagacaccttcttcaaggtatcgggcaatgatctgctgatcgtccccaacaagtacctccaggagctggcctccatgccccctgagaagctctctctcaacaccgccatcgtggacgccttccagcgcctccactccatcaccaatgtcatcaccgaccacagtctccaaactcgcatgctcaatgctcgtctcacccccagactgggtctccaagtgccggcagtccaggagcagttcaagaagtaccttcccgtcgaactccctgcgaattccaccacagaatggaccagcatcaacgcccttcacttggccaggagaatggtccaccgcggagtagccacccagttcgtcgacgagctcaaggagaacgaagagtatatccagaccgccatcaactactcggaacacggtttcaagcacaattttgccctccgtctcttccccgactttttcaagccgattgccgcccagttctctccaacttcatggggtgttgacgccgcactccgcaaggccagaaagatgctcatccccctcatccagaagcgtcgcgtcctcgaaaaggatcctgactataagaagccagaggacttcttgcagtacctcatggacggcggcattgccgaaggcgatagcgacgagatcaccgtccagagattgatggtgacgtatctcggttccggcccgtccaccatcattgccgtggcccagctcctgtttgatctctgcgtgcacagcgagtacgtcgaggtgctgagggaggagattatccaagtcttgactgaacacaacgggtttactcacaccgccctggccgagatgaagaagctggacagctttatgcgtgagtcgcagaggctcagtccgcctactctttgtaagtctctttttccctattcaatccatgatcaactgagactgacaccgcctcagtgggcttcaacgccatagtccgctccgacatcgtcctccacgacggtgtcgttctccccaacggctgccacatccaaatggccacctacgccatcggcatggacccggagaagaacggccccgaccccgagaagtttgatggtttgcgccagtacaacaagcggaagctcccaggccaggagaagatccaccggtttactactactgctgacaacaacctccatttcggtcacggcaagattgtgtgcccggggaggttttttgctgatcactcgatgaagatgattgcggcgaacattctgttgagatatgacttgcagttccccggggggaagaaggagaggccggggaatacgagtatgtatgatgtgttgattccggacttggggacgtgtgttgagtttaggttgagggaggatgcggggaggtggaattggtagagtcctgtctgaggttgttagcgtgacatggatggttgaagtgtcgggttgaggttgttgatcggctgggaaagagaccattgggaggaagggtaattgtagacaaatagggaaaaaaaaagatgaatttccatatgaccggagtagttaagccacggttagtatttttggtgatactaagaatgggactcgaggtgaaactaaaaggtacaatggttggtttatgtggctgctcgacaaccctaacccacgtttgacatcatgtctcttgggacaaccctaaccctcatattctgtgatttcatctgaaatcttcacctctcaacgacatttctcactctcaacctcgtgattcttctcgtgatatggagagagagccacatcttacgtacacactgcactatccacataatgcgccacactctcgtcgtgttcttctcgcccgaccaagccactgcgccacacctaatcttttagctgatcaagtgatgtcatgggcacatgcaaccacttgtggctgcctcccgcgccagcgcatacgtcactggggttgtcggcgcgtccgtgcccaaagcttggggacgggaggctttgaagaatcgcgagcgaacgcgcaatcattattcaattggccaaggaagctatgatatcaaggaggggaattcgcctggggcaaaagccttggactacgttttgcgattttgggatggttggttttgctgttttaacgttgaactaactggcggggtagctagctttgtgagacggggcggtttggtggctggaactacacgatgatgatggtgatttgttggggaatgttagagggggaaattatctggggggggggatgtgaaacgggggacgaaaatagatgttgtcaagagtacttttgatggggggaggatggtgaaaggtgaggtggttggctgttgtcagccctagagagctggagctgtagctggatatgcggcacaaggcttctggacttttggacccttgtcacgtcataaacctgccctcttttattagcagaaaagtcgacggcgtcaagacgggtttttggtgccgggtgggttgggcggtgccggttcaaccgtcttggggggcttcccgaaggcgatggtggaatccaaggtttgggtagtgtattttctgctggaagaacggtgatggtttgtgtatgacgcgtatagtgaaacctggatagaagaattccagttgaggttgccggcgagcaagcacaccaggctgtgtacacaccacagcatcttatgacctacctttgaaaaaaggtgacctctcaccgcaacgggcacacgggttacggcacgggaaagcttcaaggcaaagggacccgctcgtgggtcaagagtggacttgggccttggcaggcggtaaagccagccatggcatgagatcgatcaacggtgcgctgccctggtgtgctgcgggaaggtagagttggaccaggtccccagtttccttgctggggtggctgcccgggctggtgctgtcgcctgacgtatgaaaggtatttaactaacctgacctgacctggattttgcttttcgggtcctctctctttgtttcttcataccccaacacataccaacaatcacagaacgaaccgttttcgatcaacaaatatcgataccatctacacctaccagttttacacacaactcaaacaaacaacaccatcaacatgcctttcaccggttctgacatctgcaagatcatcttcgccgtcttgctccctcctcttggagttttcctcgagcgcggctgcggtgctgacctcttgatcaacctcctcttgacgatccttggtgtatgtgccctttcttcaccttcgatctttttctatcccactaacataaatccagtacatccccggcatcgtccacgccctctacatcatttgcaaatactagtctcgtcccctcacacaaaaaccgcccaactgaattctcaccgatagcaacgcaaaactcaccgtcggggaagaaaaatgaggttgggcggtggaggaggaggggaccgacgggaagatgggcggaagaaaaccaatgacttaattgcgctttctccaagcctgcgccgctgacgctgaccgcccttgcgcaccttaccaaccgccgcacgaccccgctatcttttgttcggtgggctgagctacccctagcttcagcgccaagaaacctcggcaatcgatggtatgacaatttctaagatcgggactaccggtggtggtatcaacggcagtgggaacggtgcggaatccggggaccgttaatttttgttctttggaacaaggagtggataatgactttacggctcttgtttttttgttgttttcagttttctgagcgagggtttactcaagtaattgctagcttgggaaggaagaaaggcgaggaggaaaggaagtggtggttgtaataactcacgatacccgttgttttgagaattgaagatattatcgtctcgtgatttcgtgaatgttgaataaacttgttcgcagtgactcacatgtttagacgggcggtccatgacgttccggattgatatcggtctcgtatgtttacagagagctctgacaacatcacagcccagccaaaagttttgatggaattttcgactatgtatatagcaagtgttattatcttgccaaactggtccattcaaaacatggtttcccgtcgtcataagttctcgctatctctttctcccctatactcttactcacaacctcacatactccctgttatatagtgacagtgtcttacataacccacctttcctatgtcgataatttgtcttgtttttctacaggggcgataaacctcagcatcaaactgaacaaggggccagacggggtatataacattgctgcctctgataatcagatctggaaaggctgatatggtcgctggtatctcataactcgcaggcccagagtctcaaagagaggtgaatgtgaataagtcctataactagcatcaaccggttgcaaccaacattggcaattcgctatgcctgctgttatacatttatattccaacaccatcccgatctacctatcctgccgcaaggactcgtagtacgcctgtagaatatatgaattccatagtcgcagatcacaacgctctcagccccatctaacagttccatggaatcgtcgccgtagcgtcaagataccacccactcgtctcaatatcctccctgtatgatactccgctctgtatgccatgcacccgatctacttaccaaccttgaaagacaaaatctaagaaaccgttagcaacccaccgcacctctcccgaatcaaaaagcaccgcaacaaagcaactcacatcgttcttcccaaccgccaccaactgatcctccgcaaccctcaaccccccagccccctcaatatacgcaatcggcgcatcccccatcaccttcctcgccacatcccccaccgtcgaccccttcttcaccagcacacaatccctaaacacccccttattactccccatcccctcccccacaccccccgacccaaaggtagcaatattcctcaccggaaaaaccggcacaagccccagaatctcggccgccttcgtcaggacatgcaccacgcccgtagacccaaaccggtagagaaccatatccttgaggttctctatcctgttcctgttcttctcgtcgagctctttaagcccaccaccgtccggatccccatctgctatcaagtcctctctcgtgtcgacaaactctgatccttccgtgtagcggatatagccttgcttggccatcttcctgagaaaaatctccgaaatggccgagcagagcacgatcgaattggggtcttgctgcttggcgattttggcaatgttcttgtccgcatcggggtggtcgattttgttgagggcgatgacggtggggaatttctcatctgtaaaagcgtttaccacgcggtcgatggtttcatctattgccatattagaaaggaggaggaaaaaaaggaaaaaaaaacaaaggggggggggggggggaacaaaccactccactcctccaatggctccttcagtcccaacttatccaacgttcttgccaccacagcgctcgtactcccgtacccggagaactggttctgtagggtttctactgcggtcgccttgacggcgatgtgtcttcttttgatgcttccccatttcgtcatgagattccccctgatccaggctacaatctcgcttcgtaaccaggcgatgtcgacggaggggtcgtagccccgggttactttgccttctgcatcggtggtgcccgaggcgtcgacgacgtggatgagggcgtcggcgtggcggaggtcgtcgaggaatttgttaccgaggcctttgccttcgtgcgcgccggggacgagaccggctacgtcgaggagctcgatggggacggagcggcggccgttgtcgcaggagccgtagtttggcttgcatttgtcggttaggttgtagcgggtgcaggcgcagtcaatttggaggtagcctattgcgcgttgggggtctatggttgtgaagctagtgggcgagttgggggttagttatgggagagagattgggagggagagagagagaggtcgtacgggaagtttcctacggcggtatcagcctctggagcttgggaaagcaagggtttgttttgttctgtctctacccaccaactttggaggaggcatctgtgagggagttgagggtgcttgatttgccggcgctgggcttgcccacgaggccgatgagggggtctcgaggcatggtggacgtttgtcaaatctggtgggagggaggtttcgtatttagggtatatatcaggagatggggccggtattgagaggtgagcgggcgcgaggtggtttgcgccgcgaatgtcgttgcgtgcgattgagtgtccttggttgaaaatatctgccccgcagtcgttgataacgataacgggccgtggaggggcacaatcgtggtgtctcgggattgaaattcaatgtcaccttcacacatggcatgtctgaggtttgttcagcctatgagaagcatcaattgaatagttgatgtttttgagtccagtgggtaaccttcacagaacagactgctgactatcgccagccccataggtcctcgagaaggttgatctgtaggtcccaccagcaaacggacaatctaagagcatacaccgtcatgaccaatttaagagtttcgaatgtttactgaattctattgcatttgagcgggtaataatttggcggaaggaagcgatcaccaataccggcatcgaccgaggaaaggcacattcgagcgagagtaactgcatttgtttcaagtccagtggagtcggtcattcttagaccaaccggcaatcaaggctgttggtcagcacaatcacaagcttgagaactaaacaaacaaaaacccgccatggccctcccgatacaagatcttcctgcctgggcccgcctcaacgatgtctccttcgacaatgtcgaggtaaccaccaccgtggacaagggatacggcgtggtcagccaaaaggacctcgctgcccctgaaggcaccgtcgagaccccacagctgctcgccgtccctcacgacctcatcctcaactctctggctgtcgaggaacacgcaaaagaagacaaagagttcaaacagctcctagaagccgtcggacaccatgtaaccgtgatccccaaaacttgaccttctgacacagacggctgacaataacgtagccaccccgcgtcaacgttctgctcttcctgcttgttcagttagcgcggaactccagtcacgcccatgtgggtgtttccaatccatggactcagtacttgcagttcctgcccaagacagtcttgctgcctaccgtctggaccgaggacgaaaggccactgttgaaaggcacctcactggaggtggctgtgggagcaaaactcagagccctcgacaatgagtttgaaatgatccgagaagcctcgtctgatatcccttactggaacggccttctttggcacagtggcgccgtctcgctcaaagactgggtgcatctcgacgccctctatcgatcaagatgcctggagcttcccaaatccggagagtcaatggtcccctgcatcgacatgatcaaccattcgtccgacccaagtgcctactacgaccaaaactccgactacgaggcagtactgttacttcgcccgggagcgagcatgtccaagggtcaggaagtaaccatcagttacggcgacaccaagtctgcagctgagatgctctttagctacggcttcatcgaccccgaatcgacgtccgagagcctggtactccctctggcaccctttcccgacgacccattggccaaggcgaagcttgtcgcgtttgggaaagcgcccaaagtccacgtggctcgggagagcggcagcatccggtgggacagcaattttgcatatctcaagtgtgtcaacgaggaggacggcctggactttcgcatcctgcaggacaacgagggaaaccagcagctgcgcgttttctggcaagatgaagacgttacagatcagatttccgagttccaaaaactagtagcccaaactcaccccctccccgaagtcctcagacttcgagttgccgtctcagttcaggagaaccttgagatccatcttgagcagctcaagtcggagcttccccgccacgactcttcgacagtcagagaagaatgtctcaagcatggtctgctgctccgacagatcgaaacgagtctattggaagatgccatccaagcgttggaacaagaggtgcgtctcattgcttccctacctgcaacatggtggtgatggtggtctgggagagccaagctcaccggctatggtaaccaatcggggcagctgctaacacggtcatgcagaaaaactcgctactggaagccgaaaacgtggtggcttatctcggatcgatggagacttccaattcggacctagtcggcgaagaggcgtccaatgaggccgacgacttcagctaatggttgcagacgtacatcatcctcctgcttctttctgagtggtgtgtggcctctgcaacattcgtatgtcaaccgccgtagaatggttttggcttcttgagacgcggccttaccgcaccaatctcagcatggttcactttttgacaaattctttccacatatgccgctttcttttttgcacagaatgcagagctgcttgagctattgcgcagatcgctacctctacggagttggcgagagtcagcctagagggactacattgactaacaaggcaaaaggttcctcattgtctcagatgcagcttggctaaggtctcttcagcaaactcggcataggttctaatctcggattcagcatcccgacagttcacggacgctatagaaagctctggttattcttggaaggattttggaagcgacaacagccagaacaacgctaccaaaaagacaagctcaacaccagcccccaaccgccgctatcaacaaggtgtgcctggcggtcaggactcttgtcatgcacagcaggcgtggttcggccctgtcaccccggtgaggacacggcaggagagcttctggaaaaatcggacgcattttctacagcaaggcacctttggcttcaatttattgacacactcaagggtcgaatgcagccgcctgccataagaaaaaacaatctccacacgacatggggtattttgccggaaagtcgatctcaaaaagaaggccacaactatcccccaaatgcggggaaatcttgggaccctcgcgaagaaccggacctgtaacggctttgatgctccctcagccttggggttctttttgttagtgtggggatgacgtttaaaccgaagcgccgaatggaatggttcaaacagaaagcttcttaatgcgctagttggggattgttaaaatgtatgtaagcggttgttgtacaatcgaccgacttgaagatatatcgccgacctgttatccaattccatcattcgaatgaaacaagcccggcagggttaaccatggagtgtttgccggctgatcgtttggaaagagacttgatcatcgctgtttcaacctgagaagaagctcatctgtcaagttccaaagcggggggagattcaaggcttctgttttcaaggcataggtatttgggattggtttggggtattcgtacttggctacgacacacaagtcctatgtctccaggataataatcccctctttcggacatcttgtgctgatattaacaggcacacagacttggtcaccgttcaccgtggccttttgatcaccgcctcgggtggcaaagagcgaagctgcttgcagtattgcatgctgatgctgtgtggccatagctgtcatcacgcatgctgtcgtcgttatgatgagcttgacgaggctggtcacacagacgacagcgatcgtgacgaggtccgcctgctctctcgcacttgtcccaacaaacagtctggcaactgcacagaaacctggtcggtagtatcccatcgtcgcaacgcccaggaacttcgcaacggcgggttgtgtctgccaagagaaggcgtcccactttccaacttttggtctgccgaagtgctcatcaacagttgcagtggtgatcgccagcgttttccagtctctgccagtgagagtggccgacgttagcctcaaagtagcaaaggacagccagttggaaagtggcagaaaggttgttagggcgtggttggcaaagtcttgggagctgtgttcaccgtccatgccgcgcattgttttcggtggccatggttttgccattgcccatcacttaccccggaacctgccagagctgcttaccattttgccatgcggcgtcctcgtgatgcaggacggagaaggccccggtttctgggctgacggtaagcgtaccatggacacgcttctccatgatgccatcatcacctgggtggcctatctgagcccttctcgagcattgaaatgacgagtttgaacggatctagccccgtggccgacacagcgagtgacagaagagggtggtgccattttctggtctggcactttcgagtgggtgtggtcatcaggaacaggggaatctgtttccccagactcagtacggagcagtgctagcccgttaactctcagctaacgcaatagcctccccccagtgagcaacccccagtgagcaaccccccatcccccctgctcaccccggattcccctccatgtcctgctggaccgtgattggggctttgagggctgggcgacgttggcaggccagccatccaatgatttgtctggatttccaacccctacaaccctgccacgccgctccggccaagggtgcgcccggttgcgagtgctgaccgaccgtttccattttttctccgcagattcaatcgcatttggactgggccaaggtcgaccagagccagagagaccagactccgcgtgggccgaagtccccaacgtgccagcggacgagggcctgcagcttggctgtccacggcgcctttcccttttttccctcacctcccgggcacacacactcgtcctggcttatcatcccccgttccgactctgggcagggcatgttgtcattcatattaaacccacccgccccgcctgtcacgtttcccaattcccccctctcgaatatagatttgcctctttttactctagaattcaaaatcttttgtctggtccatccatcagtcagtccatggtaaacgagacacctgcactacgacgacaaagccacggggtccgagacagctggtgaggtctaccctgctactgatcgcatcgcccgcatctcccgttcagccattccgcgccgcccgcagcccgataccaccgccaccaccacttctactctcagcaaaaaaaaaaaatcataccgcgacgttttttttttgttgtgtaacggtatcactgtgcgaatgagaggatatcgataggctatttatttttgttgttgaaggaagaaagaacgaaaagaagaagcaaacgaattcaggggttattttttgtcgaccaaaacacagacagcaagcaatcaacaagaccgccaaaatgccaggaattctgcctatgaaggtcatcaaggtgggcacgagctcccagagccgtatcgcccaggcctgcgacagatgccgcagcaagaagattcgctgcgatggcattcgcccttgctgctcgcagtgcgccaatgttggctttgaatgccgcaccagcgacaagctcagccgtcgtgcctttccaagaggctacaccgagtcgctcgaggagcgcgtccgcgccttggagtcggaggttagggagttgaaggatctgttggacgagaaggatgagaagatcgacatgttgtccaagatgcacagcaaccgacggtcaccggcggaatcaccacatagatcaccaccgccaactagtgtgagactggagtctagcccaccaccaagggaagataccttccgtgttcaggcctcgccgttgctgctcggtgttgagaattcggattcgtacttcatgggcgcgtcgagcgggcggagcttcattggtttgtcgccgtctttgagcagactcgctttcttgccatgttttgctaacatgccatccagaatcatgcaagaggaagatgcaggagaatggcaagtcgtgtgccgatttcaatccagaagcgtttttgcacatccaggggtgctatcctctcgcacaaaaacaaccatcgccgcagatgagggttcctccacggttgttcaccgaccgctgcgtcaatgtttacttccaggagtggtcgccccttttcccggtcctccacaagccgacttttcttcgcgtctacgaggagtttgtggcggacccggataagatcaagaacaaccacaagcttgcgcagctgtacttggtctttgcgatcgccgcgctgtcgagtgaacaaccagatctcgagcagatcgcggcgtgtgagcagcagtggcagcgggccctcgaggcgattctcatggataataccatggtgacgcttcagtgcctgttgcttgctctcatgtactgcaccattcgggctgactacaagaggctccagcactacaagggcattgctgttggtttgtcgcaccggttgggactccaccagagccagaaacggttctcgtttggtgtcttgacaatcgagacccgtaagaaggtcttttggtcgctttatatgcttgattggtatgttcatccgtctttcaattcgctcacaagcacgtcactgaccggtcatagcttctctgctgccctgctcggcctccccaagctcctcaaggaagaggacatccactgcgagttcccatccgacacagacgacgaatacgtcacggagaaggggttccagccgagccttcctggcgaggcgacccgtttgtccaacgcgctcgccctcttccggggatcccgagtgctcgcaaaggtgctcgagaagatttacccttcggccacctcgcacgacctgtctctccagcaaatgtccgctctcgaggctgagctggacgagtggtacaacaacctgccccagcacctcaaactcaccttcaagcaggacaagccctcgaccgacgtgacaggcagccggtcccctatccttgtaagttagcggacactgcaaaatccgataccgcgtcggtgctccaccggtgctaaccaggtatccaggcccttgcatactactacatccgaaccctgatttaccgccccgcagtgacgtctagcctggggcccaaggcggccccgggcgctgctgtcggtcggcgagtcnnnnnnnnnnnnnnnnnnnnnnnnnnnnnnnnnnnnnnnnnnnnnnnnnnnnnnnnnnnnnnnnnnnnnnnnnnnnnnnnnnnnnnnnnnnnnnnnnnnnnnnnnnnnnnnnnnnnnnnnnnnnnnnnnnnnnnnnnnnnnnnnnnnnnnaaagagctttaaaatgaatgaaaaaatatatgtttaaatgaaaaagaaaattgagtcaataaaatttaaattttaattgttaattataaaaatttaagggagataataataaaaatgtatgatggtaaaaaatgagggaaaaaattaaaaatgggtagtgataaaaacgagatatgtatgagtgtaagaaataattcggtgaaaacgtattgggaatgattgtatgataatttaaaaaaaaagagtaaaaaatggagatttaggtgaaaaaaaaaacggtgttagggatgggatggtgtagagtgtgtttagtttggtgagtcagtatagtttgagttgttgtgagtgtgatatggacgggatggggggggggtggttgaggttggatgggttgggggattttgggaggacgtcgtttgttgggttgcaaggggttgttcggttgctggggaggggtatttggttgatgggttggagtttggaatctgatatataggtatcttgactttttgacgagtttcaagggcgtggagtattggagttgggtttggtatttattctcggttggggggcgagggacctggaattgggcttggataccgacggtaccggctggagtcttcgattgtcattcatcatcgggtggtatttggttctatgatgacaggttgcaaagcttgcatttgttgggtctttttcggtggggggatggggggatggtggtgtttatattaacgctcgcttttttttttctttttttttttttttgagcggatggatattattgtcttttctgaggattcttggggtttatatggttcaacatatgattattttagttacagacggatttttggacagttagtatagcgggattttagctatcaatgaatggagtcaaaagtattcatacacatccagttgtgatcgatcatggtagaggttgagttgagcttcccccttgagacatgcgtcgagtgttttaagacaccaagaacaccaagacatggacaagaatggtctggtctccgataagaaatccgaatagcctcttccctttggcggtgcatttacgatagccgccagagcccaagccctgtgggcatcgttgcgcaccttgcctaatccatctcacgcgacagggtgacaggtcgccatcagaccaccgctgatgagcacatttttgatcggagagagatttagtcagctcggggctagtaactttagcggggatccataaaagatgccagccgggggttctcgttcgggatgctcgctgtttgggaattcttgttgggattcggggatctgttgtggtgtggagagatcagggtttgcgagtcagttacctgcaggttggatctgggggatgggaggaagacccagaagggccgggaagggaggggggtgagggaggtccacattcttattcggaataccgaaggatggataagccttgatgattgatggtcgtttgctaacactacgatgtggccgggggatcgtgactggtggcatggggcctggcttttaggtggtggttatgctacgtggtctgtttgatgaaatgaggggagagttcgtggtggattattgtgttggtgtgtgtggggagagcgagcttgaacagctgatgacgataggagtgacgaggacaggtgctgccatggaaaaccctacacgggaaacagctgaatgccgatgctgggaagcacccaaaacgagtttgcctccccctttttggccaattttatggaatctggggtttgtgtgggcacgtggggaaggaggaggtttcggacgaggttgttggagtctggacggagaaacaggtaccgtgggtttgatacaggcttcttccatgggatgtcgggagggatatgaagttgggcgttgtacagtatgatcactttctcgtgttgacatggagtgagtataatcgttacgtctgttgattgccctcgtgaccaatctatcaagaaagaaaagagaaattctaggggggccattaccttttttctaggggggcattacccccccataccacaacgtatttttctcattacatccatttatttccactatgaccaatatcgaagtgaattttttgccttacaaattacagtatatactttatgtttaaaaatgttgtggttaatatactaccgtagtgttaatgcccgatacctacgccccaatacaagccttccacctcaaaccacctacccccaggccttcaattgtcgggccttcatttgcaagtcgtgagcgttgatgtggttgatgatgtggttgattatgatgtgcgaggctcagggaccatatataaccctaaacccatggggggtaatgccccctagaaaaagggtaatgccccccctagaatttctcaaagaaaaacatcggttgcaatatcggaatgtgggcgttcttccgtctcctgcactgtacctacatgcgtatatacgccgtacatcgacggacatatgctgcgatgcgtcgacacataagcgactccaacaattctctgccgctttcttggaggtaatcatctgtagttggctcgtttaagctgcggttgtaccgcatggctggctcgtccacaatgtatgcccgtcatgcgacgcaaatccgatagccgtctgcgacgctggacggtagggtgagcaccttattatagagtgtcaaagatttcaggctgaataggctcgcctcgcgagcgggtgtgacctaagtgtgcttaaagatattttggagatggggtgaccagaggttggaggcgagtgtcggtagcaatgatcagtgtgtcagtcaacccgcaaactaccgagatctttagggcatagctacctaagatcacctctttgtagccttcggagcattcaccatagtaggatatgatacacattacagaacttggaaaaaggatgcaaatcccgcaaaaatccgatctgatctgatcttgttgtgccccgccctccggaaaccggaacgcgtacctagcgccagatggatggaagcggccgcaaaaacggcgtggaggcggccatcgcaccgggatttaaggtggatactaggtccggtatctccggccgctaacagcggttgggcgcagttgcaccagcggcggaagctccgccttggcagctaagacgagttgccgccgccggctcgggatccaccaagaacccgccccgaatgcgaccgtgtttcctgctggctgggtatatacgactccacttgcttgcgacgacgacgaggcgtggattacatcactctggatatacttcaagacttcacagtttcggtattgcttttgacgacgtgacgttgaactagagttcagctgccaactgcaattcactcaaccggtctcatctgatcagcttacaccacatctcaccatcaaccagcacactacaacccccttgagcaacatgacagcagaagagatcctcaacgacaacactaaacccccatcccccttccccctcgagaaacccccaacccaccaccattccaaccaccacgccgcgaaaccaaccccccaaatcatcgcccaccgcggctacaaagccctctacccagaaaactccatgcttgccatccaagaagccataaaagcaggcgcccacgccatcgagacagacgttcacgaatcaaaagatggagtcgtagttctatcccacgtacgtctcaccccccatccccttccacaacaacactaacccccnnnnnnnnnnnnnnnnnnnnnnnnnnnnnnnnnnnnnnnnnnnnnnnnnnnnnnnnnnnnnnnnnnnnnnnnnnnnnnnnnnnnnnnnnnnnnnnnnnnnnnnnnnnnnnnnnnnnnnnnnnnnnnnnnnnnnnnnnnnnnnnnnnnnnncccacgccagcgaaaaaaaaggtcaccaagggaaaacaggcaggccgaggggggtcccacgtacgggtcaccccccagccccttccaggagaagggggtgccccccccggggaataggacccaaccctaaaccgctgcgtcgccggcccccccaaaatctccacctgcacctggccctacctctccaccctccgtaccacccccccccctcacgtccccttagctcgcctctccgatttgttaaactacctctcaacccccgatctatcccacatttgggtattactagacatcaaaacagacgacgaccccaacctcacacttataccctccatcgcagccactatcgcctcgaacccaccgccagaaggagcctcctggacgtggcaggagaggattgtgcttggggggtggaatgagaattacttgagcgcgttgggggaggagctccctggtttcaggagggcgtatattggcttctcgctgctgtatgcaaagaggtttttggacgatgagaaatgggcgggggtgcagtttaatctgttgcagcaggcggttgtggggccggttgggaggggatttgtgcagagggtgagaagggcgaggacagagaggaggttgtgggtctggacggtgaatgatgaacggtggatgaggtgggcgtggaggaagggggtggatggggttgtgacggatgaggttgggttgttgaagagggtgctggatggggatgaggacagggggagggggaagggggtgacggtggggatgtatatcaaggcggcgatgatacaggctttgacgttggttttggtggtggttatatggggaaggttgaggaaggtggggagggtaattgggggggaggtgaagagggagcaggcgaaggggaagaattgatttgaaaggtggtttgtcaagagtttgtgctggaaagggtgtccattctgggggtggggcatataacaaggatacttatctgggaccggcgggctggtttctttgcgggggccatcacagccctattgacccgtaaacagggcgtgatggatacgtttgtttcgagatgggagggtcagggagttttatgaggataattcagtagtcatagcgtgcgggagcaggggatcgtgtgggcggttatggagattcggggttgggtgggattccattgattagttatgatacggagctgtacacagcgagtgtttccagtcctccaacgttgttttgtgttggaggccatcctgatagatgtaatctttaatctcatctattgaaccatcaaggtgtctgagcaggggcgagtgacagcatgctgaaactgagcggtgacttagacaggcagtgttggcagccttgcttcaaagaaataagatggaatggtttcaacaatggtgtataacaaacgcaaaaggcggacactttccattcgagtctcaggtgtccaaggttcaagtagaaaagcgcagccattcctgctacattttaccagtggacatcaaaaagaagccattcacgaacccagcccctattttgaccatcactcgaatcttgtaatattctctaacttagtttcccaacatgaaaccgttctccttttcgaggggtcccagaacgcaaacatgcattgcgaagtctacgacctctgacgagaagctgtgcgggttgcctgcggtggaagagggaagtctttgccgcaaccatagatggtaagtcgccgtattgcaatccccggatcgctgcagaaaggccttgctactaacaaccttcagtgccttcaggagaacagacaagaatgtcgacggtggccgttgcgctcgggagatcccctggtaccggtgttattgcagagctcatcagtaccaggtgtacaagaacatgcaagtgaaggatgagctggatcgcggtgctcgagctcagcaagcagacgaggccccgggtcgtacagctaagcaaacgaacgacgagcgtaatcgcatattcacccccctgaaaagccacttagatcgcatattttcccccttagaaatccacttaacggacgaggagcgaatgcggggatttcgctcgcaaatcttggggggctggaatcgcccagctcagggtcaacaaactcatgaggggctgagagaagtttgcctccgctgtttcttggacaaggccctcgatatatccatcacaggggccccgcaccttatccttccttgatcacgactgtggtcagcactgtgagagaactggcaagaatcaagtgatatttcctcgtgcgcagaaaaagaggcagtcagtcagaacccggtggtcgagaagcccgttatgggagccggtattgtctggagcatgacaacaggtcgacatacagtctgtaggggcgagtaagaagcagcaacaagtcgaccttatcttgtacatagaatatagctggacgctgagctgggtgggatcggaaatgagaacagttgatagagccagcagaaaccaggtcttgttgagatatcctcatggaatgtatacatgcagtacggatgttggcacctgatgagagcgacacgcaatgaatgggccatgactggaatatagaggataaatcgctagttaatatccagagattgtacgctgccgctgaacagaatcacacagctcaggtcaagaccggctattgtagtccagacaattccgcgcacctgatggatggctccagtgcatgctgctgctaggtatgacaggtatcagttatggccaggctcgatgcaaacaacttcaatcaccattttcaactcaaccacgatcatgagctcaagtctcaccagccacaatcacacatgtataaatagatcgtcacatcgcagttcggacgaattccagaacccggcccgccagctcccgctgcagcgccttcccgcaccgccccactccaaatcccccctaaaagagcttatctccgggtgacgagccaaggcggcgggctgctgacgtagctggccacagcggttcttcatctcaggtgccgacagccttcatgagacacctcggattttggaacccgcatccggccgcgtcacttctgttttaatacaaaacaacaacgatctgtcattttgctttatttgcttgatatcgctctcttgtcctttttttgttgcagatcgaccttgaatttctgataatagctccaagccatggacgagtactcgggcggaacaccggaagctgaccatctctgcgtcttggtccacggggtatgtcatgtcaatggcgcattagcctcaagtcaaatcagctgctaatttttgttgcgcagctatggggaaacccaaaccacatgaaaaacgtcgccaaagcccttcgcgatcaatttcccccaaataagctgcgtatcctcgtcgcaaagcgcaacagcggctcctttacctacgatgggatcgaactcggtggcgagcgcgtgtgtttggagatcgaggaggagctggcgttgatcaagagcaagggtggaaatatcaagaagataagcatcgctggctactcgttaggtggacttgtcgcaagatatgccatcgggctgcttcatgcgcggggtgttctggatgacctcgagtgcaaagtatgatggccagccacctcgattgatgcaaccgacccaatgctaacctgatccctagaatttcacagctttcgcgagccctttcctgggagtacgagcccctttgcgaggttggtcagacaggatatggaacagcctgggcgcacgagcactctgcatgtctgggaggcaactctttggcattgacgaattccgtgacacgggcaagcctcttgttgctgttctcgcagatccaaagtcgatcttcatggccggtctggcccgatttcaacgacgcacgctctacaccaacattgtaaatgacagaagcgccgttcattacacgacggggatcacgaaaacagatccatatgtggacatgtcaaaaatcaagaccaaccctttaccaggctacgacggtgtcattcttgatccaaaaaacccagtatcccccgccgcgcccagagacccagaaccgctgatgcaatcagtcgagaagtgggcaaagcgagtcccaatcatcgcgacaatagttgtcttcgtccccgttgcgctgctagccttcttcaccaacgccgccatccaaacagtccgctcgtctcagcgtgtaaaactccacgagagtggaatggctggtatcaaaatagaaggctacagagtcaacctctggatcaaggaaatgcgcgaagctgtcgaggacacctacgagaacatcaataactcgcaaaatcaacaatacttgggactgtcggaggatgacgatgacaacagctcggaagataggcacctgctttcgctggagaggaaacagtcgcacccgtatttccctacgttggcgctggcaccgtatcagttttctgctattcaggcgttggataagcttgggtggagaaaatatccggtttggatacacaatgcgaggcatagtcatgcggcgatcattgtgaggatggataagaaggggtttgaggaggggtgggttgttttgaggcattgggcgagggatgaatttttggcttgaggagagaatacccaggtggaattttgaattggtttttttgtttgggatatttaatggtatagatagtgggagtttgagaggtagtattgttttagcgatgtttggagaaaggttggatatatattacttagagattcttttgttgggtatgttttttattgtgtcatacccatcagtagaaacacgcttctattttcttgcatgcaagtctctcagcaatgatcggggtgggtggggggtggggggtggaaggctgtttgcgcagaaggttgttgggtttgtttatatgagagtgttgtaagttggcacagataccactaaactaagaataaataatgattgaagatgtaatacagttttgcttgtgatgatgtttgtcgaggctcagatgagggcctgacaatacagaagtcgatgcgatgaatcctcgaggagtcgagatgacgttaataatacaacaagacgaacatcggtcagtctcggttagagcacctttataagcatctttcttatcttgcaataaaacgaaccgctttagtaacccaccactaaaggaacgaatcacggcgttatccctgagaagctgtctcaaggaagaaatctggccctcctctaacaccccaagcatgcatcctcagtctcctaagcacgcatcagccatggtccagagccagacatacgaaataagaggcggacccatgttcttccattcggttattgccataagttaatctgagagacagaaccggacaaagtaagcttcggtgtgcctaggggcgggtgagcgagagacagaaagaagttttcattgaaatcctcaacaccactccgcacttcgctaggtaaggtaacgcagggtgaatgtgtctctggacaggttatcctgtttaccgaccggtttatcatatcgagcacatgcaaccgcaggtggtgggaatgaagcgcaagtggtgatgaaagttggagttgctccacttatctttagagtttgataaagtcgacgtcaagttgggatgaagacgatatcggtcggagttgggggataaaggtgagaaaatatggggaagggggatgataagtgaatatatgggatgttgcccccgaggacgtctcatgactaccctaacccccttgacgttggtggtcgcttccaaattactgacaagacaagggaagtactcggtttgagttttttaagggttatcttagttcgagaatatcagtctctataactagaaataatagatttggaggaatgagagattaaagtaaatacttgtaaagatgaaaagtgttgagaggagggattttgatttagggggttatatacattgcgacatcttctagacaggatcaacacgaagtcctccataccaaaaagtgttcccaatttggataattaacgcaacagtgaaggattactgaagaggattggccaacattttgttttctctcaccattcagtctcccccagaatcactcgagcaactggtcttatcttacataagtatcaataaaaaaatcactagcttatgcagcttgtgcgacgctgccctgaccagcgcacaccacctgccgcatagcattgcgctgttgtcgcatcgaaatcgtgaactcaaccccactcccccacccagtaagattcccgctgttgcagatcgccacgtgggcttaacgctagacctctctggcactagcgccagcaaacactccgaacccaacagcttggtgcagatttgcgccactttttctcggccaatcagaaaacagccaagaagcacaagagctccctcaatttaacaacctcaacgcgtctccaattcaccgttgtggctgcagcttgttcacggcttcaacttggcaaccaaaccaccaccaccaccaccaacaacaacaacaacaacaacaacagttgtaaaaatgaggacgtcgcgcgtggctagggagaccacacggctctttgagactgcggcctcgacttcaacaccgctccggcgatcatccagaacctcgactttggccgcgcgattctcttacaataccaacgccagccccagcgcagctatgacaaaggtcgaagaaagcgacgtcgaagtcgacgatgacgtcaaactatcccttggttcagatattgaagatgcgatcacgacaaccagggcggccaagcgccggcgcaccgcgaccaccgcagtcaccacacaaaccatcaactcttcgcctcaccggcgaaccaccagagtaaaggcagagcgcacggctgtcaaatctgaagccggctccgattccgactttctctcttccctctccgacaacgaggacatcaagaccgccatcaaggaagagtccaaggccgtcgtgccccgcggccgcgctcgaaaaccagcccgccgagtcacctccccgtccggcacgaccaccataaccccaccttccgattgggaggaggtttacaatctcgtcaaagagatgcgtatcaacggcccagccgccaatgccgcggttgatacaatgggctgtgagcgccttgccgacccctcctctacagtcaaagaccgccgctttcacacacttgttgcgttgatgctttcctcccaaaccaaggataccgtcaatgctgaagcgatgaagcgtcttcataccgaactcccgccgttcgagcctggtgcaccagctggtttgaacctcaataacatgctccactgcccccctgccgttctgaacgagctcattggcaaagtcggctttcacaataacaagacaaagtacctacttcaaacggcgcagattttgaaggacaagttcaacggggatatcccgcctacgattgaggggttggtgtcactgccaggtgtagggcccaagatggcgcacttgtgcatgagtgccgagaatggatggaacagagtggagggcattggtgttgatgttcacgttcaccggatcacgaactactgggggtggaatggacctaaagagactaagacaccagaggagacgagaatggcgctgcagagctggttgcccaaggacaagtggaaggagatcaactggttgttggttggactagggcagagtgtctgcttgcccgttgggagaagatgtggagactgtgaggttggattgaaggggctgtgcaaggcggcggataggaagaaggtgaacgagggaaagaagagaagggagggggtaaggaaggaggaggagttggttgagaagattgagatcaagggggatgatgagggtggaacggcggctaagagagagcagcaaagggtggtcaaaatggaggttgtggatgaggggatgcccccgccgccgagcgatacccaacccgagccgacgccacaacctgatcccgagtcgaacgttgccatcccctccgtcgagcaggacgttaagcccatcatcaaggatgaagaggatgttgagatggcgcgcagcgtacctgtcaaaactgacggcgatgatctcgatgaggacatggtcaagaaagaggaggaggatgccgtcagaatcaatcagtcgagccaccaacccgaggacgtcgaaatgagcgatagccccgaggtcaaagtggggatcaagcccgagccccgaagacgtcgtcgtatccccgctgcgatcccctcccgaggccaatctgaagaccccccattggaggaatccgatgccgaagtcaaggtcgaggtaaagcccgaactcctcacacgccgagtccgcatcccggctcacataccttctagccacgagcccgaggtcaaggtcgaagtcaagactgactttgacagaagagtccgcattccggctcgtgttcccgctgggaatgagtgtgacgatgaggaggccgaggtcaaaaccgagattaagcctgaaccgtttccccgacgagctcgcatccctgcccatatcccagagcgggaatcatcgcccgaggttaaagttgaggtgaagacggaacctactcgaagacgggctaggattccggcgcgtgtttctgggagaagtgaggaggtgaagggcgaaccggatgttaaagaggaggattcttagtatgagtctgactatgactttcggtttgcctctagccccgacttggactctgatgaagatggggatgagcaaaagccggtcatcaaagatgaggatctcggcttcgatgacgatgagcagaagccagtcatcaaggatgagaataccgactcgggctacgtctttgccgctcactttgaagaagagttgccctctgtcaaagatgaggactctgactcgggctatggatttggctcgcttgatgatgagatcagttcaattaaggacgaagactctggtttcgacgatggtttcgacccactctctgatgaagatgtggtttccatcaaggaagactgcgattacgattctgattttgagattggggaggtgtttagagctgatgcccttgcgtctgaccatggttctgatgatgagataatggaggaaggctccgactacgacgacctaatggatgcctcggacgacagcgagataaaattagaagactccgacgacgacgacgagattaaggaggagggatccggccgcgagattaaggctgaggactctgacgacgacgagataaaggaggaagagtctgacaacaacaacaacaacaacaacaacaacaacaacaacaacaacaacaacaacaacaacaacaacaccaccaacaacgccccatctatcaaggaagaatacgactgcagctccgactacggaaacgagcggtctttcagagcggatggtcttgcttccgactacagctctagctctgacgaggaggatatcaagtcggagtattcttctgaccacggattagaccgagaagacgacctcgtcgacgatcacattgaagatgatggaaacttcccagatccacccaacgcgactggctcccagtctaactctgccgatgccgaagatgaacacgaacgtaccgtctttgagaatttaactgccagcgaagagaaggttcatgggttacccttctcataccataaccatcagttgaccgtggcggccgcagccagggatcgttacgattttctcgggtcattcccagggtatcacgagttggacgcggcgacctcggtgaggattcggggagacttgcccagatttccgttcttggacggacatggcgagcggcctctgtgtgctgaggatgatgggttgtgggacgtgcttgccggggaggaggatgactggcggtttgagcaggatggtttaatggggggtgatgtgcttgatgactctgtttgggatgagtttggtggggaggatgaggtggggaggtatgaggaggagtatttgggggtgcagatggttggggagttcgaggggatttatgttgaggatggggtcacggatgcgtttgggctggggtgtgagggtggggagggggattttgaggatgaggaagatgagatttattgatttgttgtttgcgagtttgtaatatactgggggtagtcgtgattttaagcggttgggtgtaaatcacgaaataccaaacacaaacccactaccctcggcattcaagaatgggatactgtaaatcactgtcactgatactaccgtatcacacagtttcgcttctagaaaatagattccacatgctagtgattattcaaaacggtaatgaactatcgatcttgccgagtagtcctggatatggcttacccccggtatcccccacccaaacttcctccccctatctctcttcaccgaatctgacccggcagataaataactctgagttgctgttactgtcgttgccttgtcccggacccaccaacaagcggtgtttattgtcaccaatctcgtgtgcaaacagatactcgcaaaaactgtttaccgtctgcgaacgccatgcttcggcttgctgtgcgtggatcccgggcagccagcgagatctgacctcctgctaaccataacagatgctcgagcgtctccgcgaatttgaccatcgattgaagtggtggcaacgtcttatgccagctaagcagcttgggatgtccttttttgatagctaccatggtgggatcatgggtctgaaatttcatgctgtttgcggttggttgggaaagctggaaggaaatgacaacgctgggtttgatggaaaaggcattcgagactgctaccgtaaacgggacctgacctctgacaaagcgggcggtcggccggctttcgaacggtcgtcatcgtgggcgcaagagcgacatggtgtccggtgccactctgatcttcccttgggatcggtgagcagatcagtgaagggggggaattccgagtattctgttgcgagccttggccgccgctctcgcgcctgcgcgcgcaggcgaagctgtcgtcaacccctaataagagtttgattagtcactgggaagatgatgcaccaaaaagttgttctaatcgacaagtttgatatcataaagagacagcaaagctgggaggaatgtgatcatattactcggtattctcaaagtttataacagtacccctggtccagtttacagcaggatatccttaaattgatatagtcttcgaagcccgagaagcttgttataaatcatagaccaaacacttcttcatccgtaaccacaacagaggcctgcacacatagtcatcaccaagcaacaacaacaacaaactaccaaaatctggatcttgtttgttgtcaaaatccaaatatgactttcatctagggtccacgacatcctcaccccagtggataactcccccccgacccaccagcccaatcgccattgtgacctccatgatacgataccccagcttttagttccgcataccctacatgcgtgggccggtgggtcacccaactacctatctaggctgacgcttgcttgcttgcgtggtcattccaggaaaaaaagagagtcatgtttccgcagatacgatatcggagctattcggaaagacgacatcgtgctctgtcgtcaacttgtcgtcattagcaaccctccaatttcgtcacccatggcgaaaaagccaccaacactattgagcatctagtttgttttgtttgcgagtttttattttatttgtttgtttggtcaactcgtcttccaaacgagccaacgtaaaaaaggtgtacttgtaaatgtccatccatccatagccatgattctcagctgcacgccacctctcggcgcggctgccaaacaaacccatttatccccctcctgtcttgcgccgtgacgccttgccaaattccggaaaagtcagaaaaaaaattatgctcgaggagtggtttcgtttttgccgaagagccgccctcttgcccccatctgaaatgggggcgatgtgaatcagaggttgtaagatatatactgtgtgtggcgttgggacgatatgcttggtgcaagccacgtcgagtcttgggtattcgcaaagatgaacctaggtatcatcatcgcaaaaaaaaaaaaaaacagaccaagctgatttggatcactttttccctactaccggaaaaaaggaccggacggcttcgctatgtgtgatggacgatgggcgcatgcttgctcgatagataacaaggtcgcaaaggaggcgaagagaagcgagccgagtcacgactgcaccatcggcggcattggacgaacagggatggccgatcgtcggtgtcgtcgggaagaacagcgagaacgtttatacacccctgatgacttgggttctttctttgttgagctgcatcgcgttttgctcgaaggcttcctttttgcactgattgggggagaagaagaagaggtgttagcgaacatgtcttcttgttccgagagcacatccgataaccccacgagccaccactgagatgggtcgaaacttacgtcctccaggccctggcacttgtggtcttctagcagacggtggttgctgcaatagtgtccgccgcagaaagcgcagtcgccggaaatgcgttgggcgacagccttgcagtcggtgagcgagcatctgaccttcttgggcatgttgggcggtgttgattattggtcgagtgtgaatgatgccagtgtcgaataatgaaaaaagaagaatcgaggagaggaaagcggctcggaggcggaaagagggaagggggtggctggtttataacaagagagagagatggcctgtcagacttgttgaacaacacacagatctcacgtggtgaaagttcgcgaaccagggcaggggaatggtggctaaactagcagacaagcgcaattggaaatagttggaaaccgttcgacttgaccaggccgagaaccaaggaccaaggacggaccgtggtgaatggtgaggcaggcgggcgggcagtgggcagcgggcagcgggcagcgagtgagcagcgaggtacaagtgacttggccgtcgatgacggcaggggaggcgaggccggtcccacccaatggattatggaaggcagggcggtgcttgcgtggtcgggtccgccgtttgtaatccaagagatccacccacctgttctccggagtttgatcgcaaggagcacagtcggagtcggtgatggcaaagcaacaagtaagtagtcacttggttcatgtccatcaccacctgtcgcagacgggattttcctagcgagtgttgcctctagagcgcctaggtgtttgtctaagcgtgctgagctgttgataagcccgagagaagacggtagcctcgactcaagacttgtcccggcccggcgtgaggtatcgggtacctgtgggaccctcaaggttccttgtgatgcagtggaacgtacccgagctaggcccaagccagcgcatctcacaaagacagcctcttccccaagacgtctctctctcgtctctcgataaagaaggtccgtccacgcgccaaatggccatgtccatcggccaccgggaattgccagatcttccctccctcggctgacaggttgggaccatcatcttcgtctccttatctttccgagtgagcacggcgttgcatcccgcggaaccaagcagcaacaacaacaaacaagtatctaaatgtccaatatctgaggcctcatgtcatggcatatcgcctccctgcttgcatcttgcatcctgcccccagcacccggctatcgccatgatcccgggttgggcagcggaatgaatctccaatgtctcacggcgcgccgggctagaccacgcagcactgcagtagcagctgcagccatcaaccacacacccaaggtcacacatgtcctcttgttgttgatgttgtacatcttttgggttggtagaaggcccctgcggaaaccggcctggtcacacatcccgcccggagtcctgctctcgcgggaacaaaacctcaccgccaaccactcacccactcaaccccatattagacccgaccacagcgtcaaccccatttcgagcttttgcctgccgttcttttgcctcctttggatcagcgaattttcgatgctcccatggtgactccaacaccaataatctagttccagggcccatcacacaaccccagcgaatgacctcgcaccacgacagagcctagattatgggcttcggttgcaacaccccaaaacataacatatgatcagatatgcctgtcagctcttttgatgtccccaagctctcaacctatctttttttccttgcaaaagatcaccagtctcacacagtcgtccgtctcacgcacactatatcccattctggattgtggcccctcccctctccaaggatctcacaggtcgggttgaactccggcgtgcaggatgcaaggccaatcattttagttttttgttgtaaccagcattaacccaacggccttttttggagtcgtcccttcggataatctacacccgatcgcaacgactcgacagcgggtagacgaatctgtgaacaactcacatgcaggtctcacctttttttttcttttttctgcctcgtccaccacgacgacgacggttgagaacacaacagcatcccgggtgtttctgtcttcatgtaggggatatttcactgctcatatttcatcaaacctcatgggttgggtctagaccgttgtatacctaccatccatatcagatatcatcttctcaaaagcttacacaaagggcctagattgatttgccccataaccaagatttcttgatcgtcttacagaacttagatacgaagctacctacctagctgcaagccatcaatacgccaaaatctcttcgggctttccctctcacccaactttatgaggggcggcccctccttccggaacgttacactacctagccggaccggtaactgtcaaaccgagtcagtcagtcagccatgaggcgagcggaagctcctccgtgattaaacaaataaggggtccgtattttgttgagcagcacacacccacccccccccccccccccccggcgaaaaaaaaaaaaaggtaccaaatccgacaaaccccaagtcgtgttgttgcatacttacttcgtatcacgcaccacaccaagacacaacgttggtggcggtggtgttgttccgttggctctcaagacgaactatttgctaaagtcgagagttcgtaatgatgtgcgttgttgattacaagtctttaggggttatgctcaaccagaatacatacacagcaacaacttcatgttaaaccaaaactttctctccaagcatcaagtttccacttacacctcagcgccactaaacaatagttcactcacggcaccacgttcccacttacaacaacttaataacctctctcactcacaaacacaaaaatcccaagttgtttaatcatcttttttttctttcttattctgcccacaaagtacgagtacaagccaacgcgaaccatctctcttattcgtccatagtgacaacagcacgaatgcaatcaccctgcttcataacctcaaacgcctcgttgatctcgcccagcttcttgcggtgggtaataaactcatccaccttgagcttgccatcaagataatcctgcaccagcccaggaagttgggaccggcccttgacaccgccaaaggcgctacccctccacacacgaccagtgacaagctggaacgctatagttttgaaaaaccacatgttagccatctaacatcttgacccagtcccacggtcatgggaagtagaagacaggggaaaaaaaaaacggaaaaaaaactcacgtctagtagcaatctcctgccccgccgccgcaaccccaataatgatactctgcccccaccccttatgacatgcctccaacgccgccctcatcacattcacattccccgtgcagtcaaacgtgtagtcgcaccccccatccgtaatctcaatcagcttttccaccacgctctgcccctcgggcagcttggtcgggttcacaaaatccgtcgccccaaacttcctcgaccactcttccttgctcgggttcacatccacaacaataatcttccccgccttgttcgccaccgcgccctgaatcacgctcaagcccacacaccccgccccaaagatggcaaccgagctcccctcctccacattcgccgtgatcctcgccgcaccgtaacccgtcgtgatcccgcaccccaacaggcacgtcctatccatcggcgcatcctgctgcaccgcgacaacagagatgtcagccacgacggtgtactgcgagaaagtcgacgtccccataaagtgaaggatatcctgcccccgtgccctgaaccgggaggtcccatcaggcatgacacctttcccttgggtggcacggattttgccgcagaggttggtcttgcccgacttgcaaaacttgcactctttgcactcgggcgtgtagagggccacgacatggtcgcccggcttgacgttggtgacgccctcgccaacggactcgacgatgccggcgccctcgtggccgaggatgacggggaaggcgccctcggggtctttgcctgagagggtgtaggcgtctaagggggcgtttagcgaccaaccctggtgaggaagaaggaagggaacaacaaacctgtgtggcagacaccggtgtaggcgatcttgattctgacctcgtgggccttgggcggtgcgacttcaacgtcctcgtaggagagctcctggccggggccccaggcgatggccgccttgcaggtgatggtctggtggcgggggtggcattgtcagcggtgtgctctcttgggaacaacaacaaacaacaacaacaacaacgataacaacaaccggggttatgagttgaaaccttcatggttgagcgttgtcgacatgaagcaaggggctaggttgatgatgatgatgatgatgatgatgatgatgatgatgcggggttataaagtgatgtcatttaccttgccagctgtatcggacatgttgacttgtgtgtgtctcttgatatcctcgactttttgtctccggttatgaagatgaagtgagagagagagaaggtccagacaagaaaagttaaaattaggagctataagcctccttttgtttgcctgatttccgaatggttaattgacgtcggccgtgttccccctttgaccccgcttgtcgacgaaggtggggttatttatcgcgctgcgctgttatggaggggaggggcgggatttggattacggcaaggaaacgaaggggatttatctcttattcttattcttttttcgatatcaatgatcaatcatgactggatagatcttgtaggtgtgtgattcttttttatccttgaggagcttggcttatagcaggctcggtgatttcacggcatcttttgtatctttcaccttttatttggattatcactgctacaggaaaaggtgacggctcggcagttcttttcgtttctgtgccattgactaatagcagtcagtggtgatgtcgtgataaaggccttccgatatcaatcggtggagtaggtgggttttggtttttgacagcagaatatctgtcaaattgtatggtgagaaattcccaattgggaaagattatggcattcaacacagagtggccctgtctgagttgaatctgcgttgttacttgatgacatctctttggtggtgtggtgttgctagcaccggaccggaccgcacttcaattcgccgattcggagggggcttcattttcccgccaggggcagcaacagtttaccgcgctcgcacaacgcaagttcaaggtgacgaaagcacggatgtaaaaagttcttaacgccgggttttatcttcggcgtgtgactcttttgctcgctgtcgaagaagataggtcttctgggcgagaattcaacgggcatatgggctgttgtgaatcttcagaaacgaagacggatggaattttccggggcaaagggaaccccctgagttgatcgtgtggacaacacgtacatatgcaaggtgggaagatcaccgttgcagggttgggtgacgcatgaaaataggctggattgtggtgaggttatgctaccttctttggttctatgcttggtcgatgatgaattgcagctttggctttgaggcatagggttgcgttcgaccatcacaagatcaaatgagccacacttctaaagataccttcccttccgggccattttgaaatcttgaactcaaacttcatggctaaggtacttttgaagagaagtccagacttcatgaacctctcccacgtgtaataaagtggacccagctcacctgtcaccattctcgcagcttaccaccagcagctgcttatctcatcacccctcaacctcacttcaccacctcacttttggtctcactcaaacacaaccgaacaattcagaccctcattctcaacatccattcagccctacaacagtaacaaaccccccaacacagcaaaatgagcggcgaaccccccccctcccccctcccaagcaagatgtacaagagggacgtgaactgggattccgtctttatggcgatgtcatgaatggttcgagtggtcaggctcatgtgatannnnnnnnnnnnnnnnnnnnnnnnnnnnnnnnnnnnnnnnnnnnnnnnnnnnnnnnnnnnnnnnnnnnnnnnnnnnnnnnnnnnnnnnnnnnnnnnnnnnnnnnnnnnnnnnnnnnnnnnnnnnnnnnnnnnnnnnnnnnnnnnnnnnnncgcccccgtcctcctcctcgccaaactccgtcccatagcatccctcaccatcggatcactcctaatagtattatgcaccaaccactccctcacccgcctccacacctcccccatccccttctcatcccccgcaaacggcgccagctccaactgcaacaaattcgtcgcatccgtatccaacctcctgaccgtcccctccaacctctcaagccccttcctcaactcctgctcctcattccccgtccccctcccaccccttcccacaacaatgttcccactcgtcgtatcagccgtcagcaacggaccaatctgcgaaaaggccagatacagcgtcaacgccaacttcttggccagcgtaatcgcctgaaactgcaaatacggctgccggccaggaaaccaagtaacaaaagggttaataaactttgtcagcaaaaccggcgggtacggtctcgtgacggcatggctctcaaacaaaaacagcagcgccagcaccaaccacctctcaaactttccccagtccagataccccagcaacccaaacccgtacatcgacagcgccgccagcgtgtagtacggcacgatccccttgaagcccctgtacacataatccgccacgctgctgcaatgctgccaccccgtcaccgcctccggcccaaaccgatcgtaggcaaacctcttggccccgttcgtcaacgtatcctgcgccagctgcaggtgcacaaaataggtattcgcatcgtcggcagcgatcttgctgtctttgatcttgtctggatggaagtgcgccgccagtctccggaagcgggatttgatctccttctctgtggctgtcagggggactccaagggaggagtaaaatgagggggtggattgtatgtcatgatcggcttcgtagatggtatacaacaaataaaccgtgacgacggcaatgtggattttgcgacggtgttcggcccatcggggggttcccggcgtggggtgggggtcgccggcgcggatgaggatgctgtagaggattgtttgcatccagcctgttaccagctacgagagtgcgttagctaggagagcaacatacccatttctacccgcaaaacacagaaaaaggactacccgggtcgattggtgatgacacttgtagagtacaagtggcatcacccagcaatacaggtcttgcaagtgaagggtgtgtgaagcgggtgtgaagggggcctacgttggggaggaagctccaggctatcaaagagagaaagccggacatggttaggtggtggtagcaatgccagagagcaatccaggcggtaggaataaatgtgaaagaaatgctgctaccgtgtcataatctttcatctgcgcaaacaaaagtgtttggtggtgttgcgggagaagtgaatgggaatgcgacccaaccctcgaaatgatgtcgcgtcacaaaagagcttctgcaagctggctgcaattggaagtgtggagcacggaccaccctggccatcaaggttgccacatggccggcaggcagctcaatatgaatgaatcaaaacaacggacaggagaaatcaccaaatctcgaagtaaaagctcaacaattgggatggggaagaaagggccaaaagctcaccggccaactcttagaggtgagtcggctacgaaaccctcggtaggtttacttcgcagggggatagtcgaggtgggtgggggtcaatattccttgaaggtcatctcgaaagacagggcctcactgaggaatcgaactcaggtgtccacggagtagtgttttcacaccgggcattgttcgttgcctgatccgggtgcacctacgtcttacctgctgagccatctgacctttccagttaccagatgagtgcgtaggcgcttggtggaaggagcacggttgacctaatatatagaccatggttgtaagagtattatatttacacaaatgcctgcccttcccagctccctttgccagtctcctgttgccatatataccagacacaccttgccgcctccacataccctacaataaataaaaagaaaaaagtatgcaaaactaaaccgctcgacgaaaacaaccatggccaaacacagctagctgcaagtcgcaaaaaaacgctctccaaaagcacatactagaatgttcaagaaaaaaaggttcccaaaagtatcgcccgctcaatcaaccccatcatcatcatcctccctatcatactccctcctcggcgtactcgcaccactccccatccccccccgcctcggtgaactcgtcccacttcctccctgtcctagtctgggactgctaatcagcaacggactcctcgcaccggcaccccatcgcccattagtcaccacattcatcgctatcctctccttcctcgccctaatctcctcctgtttcacctgttcagtctgctcctcttcatcaatctcgttatcaatctcctccagctcatcctccaccgtccgcccggcgggacttaacctcctcagattaacatcctgctgcccagctccaagctcggggctgacgggatcgtccacatagaggttgggatcgcggcccagtatcctgtcggctttgctttgcgcctttctgtgaccaggagaaggcaaaggtgacggaactctgctggccggtctggaaggctgtaaataatgtctccctgctccgccatcaactctcaccatgggcggttgaggatcaggctcagggtaatccgaatcagctccccagcctgccacccgctctctttcccgttgctgttcccgctctcttgcgatcctgtctctcgcctcaagccactcgggactgggctcccagctccagccatcgccagtcgtgttgcagattggaatcggccataatagcgggacagggccgaacaaatgaagcaggttcctcttggcgccgaggtcgaaagcattgggaagtttggttgcatcctgctcgtccatgaattcttcatagcgcttgcgggcccggtactgctccatttcagagggtgtaaatctcctcgagccagcttgcaactcggggttgacggagggatgcgagggttcttgacgaagttcctcgccttcttcaggccgagtgacacccggaattgcgttttgatgaatatcgaggagttgttgaccgtaagaagggagctggacgccttgaccgggagtgtgttggttgatgtaggtcctgtgcatggattccctgagaggggtcaaatatctagttttctccaagcactcgatggttgtttggcctctggtagcaagatagatatgccaccctgtgaatgccccgactacaatgccgatgataccggcaacgatggcaaggcagatgtagttaactggcatgagattctcgacgtaagtagtgttggcgaagatctcttcccagacccagctggcggagccaaggaaggcgtatagagagaaaatcgtggtatagatgagaaaaaggatgaaggccttgtggtttcggagaccgatgcaggttgctagccaggggcagtgatggtccatcttgaggacacaccggcgacaggtggagcaatgatgggcgcggtcgggcttccgagcttggcatttcttgcagaaacggagctcgccattggacttgacggtgtatgatgtggccgaaggggcggcgtgggtcggtagcgtgctgtagccatgatcgttcgtcgtgcttcccggtggtgtaaatacggcagtggtgtagcaccagttgagcatggcgtagagggcaaagccaacaagtttataagtggttcctatcgataaggcgagactcgtcagtgtggttgggtgacatcgaggtaacaagcaacatacccagccattccaccctcgatggcacagagcagagatcccacaacacatagacggcccaagttgttatcccgtacacgaatgccaagggaaaatacgtggcgcaagtgcaacatgtgcgctcaatctttctcgcccaccggcgagcgcttcccatgttttctgtcgaggattcgcaatcgtgggatggtgcttcgagaatagggggaaactgtctggtcgcggaacgagcaactggaaggatcggggagggtgatggcggaggggatctggataacggcgttgcatccatcagttgtcggtacaatcggggcaccgtgaattatggattcatcgctggtggttcgagtggtggacttgtcgagaaaaagaacaaggggcaaggcggctggctgtcagtttagtgtttgaagttgatggcgacggcaattacaggggtctctcgccttgtgttgctgccagcctcagcctcaaacacactgagccaatggggtccccgcgtcactgacagcccgggacaacgctcgggccgcatgaacggtttggcccctgatttccggcttcacgggaccgttgaagacttctatatagaattctgcttgctacagacgtgggtggacgattgtactttggttttgactactacattactctcaagaatatgctgatcattgtggtttggcaagagaagacctacctgttaattgaaatatcgaaaccttgactatgctgtgactggccaattctgtccagaggcgctcttggtatcttagactgagggggaatgctttagcatcgagcatagttttgaactactacagatatccatgatcaataggaagaaatgccgggaacgtaaagtcaggattttccaggtagcctcacctcgctcagcatattcgccccccagtaatgctgcaagtcaagagatttgaagcgaaaaagcatgccattgggtatcaccagctcagacatgcagttgtttctgcgttgtggcatggcggtgaagctcttccggccagtgccagctgaagttcggcggaaatgcacttggcagattcgctgtcacatgcaactactgacgacattgctgggatggtggatatgcaggaaatgaaaagccgtctaggggctagctgcataggcacggtaccttgcgtaaatcctctatggatgacggaagctcttctccatgtacataaaaccaggcatttaaacacgcctctacaagactcccaaaagctcgggttttccgctcttgcatgccgtatcagaccaaccgttcatcccccggtaacgaatcacgcaatcagatcgcacccagcccgtgttcaagctcactgagcctgcagccacattgggacacgtgaagataacgggccggtggagaagggccaagtgagagagccaagacagcgcctggatctgggaccaccgtggacagggaaggggaaaaaaaaaaagctcgataagatccatctcgtcgccaaatcctagccgctaattttctcgtgccggataaaaccccatcgccatcgtctgatttgccagacgcccaaaagaaaccccagatgggtcgtgaatctagagcctttacagcaggacaccacaataacggacccatccctcctccagcaggtgcctagcaccaccacacgcctcgaaccacacaactccccatctgcctttccccccctcctccacctccccctcctcctgcgcaccattttcgagcctgccattccgccgttagatcgacactcgtcccgcgacaagctcacgatattcgatcgatcgatctgtctcgaatacgcatctagaaacaaacactcgcttggcaagctccccgagaccaccatcgacgtcctctctcgccctcgctggtagccccgctaccttgcacggcgcacgacgccttttgagccaccaagcacctatattccttttaaagtgcactcctagtggggaggggcactgcgggggaagaacactcgcccgccgcaaacatgtggtggctcatcaacgcctgctcgagtgccattttcctgttcagcatcgtcctctcgataccaatcgctttcgatgtcgggggccgtgatgctggcctggcttattcgctatcacttttccttttctacattttctacagtaccagcaagcttataacgccagagaagtctcggatacgctggttcttcaagagtctggttgggttatcacaatggattgttatacccgcattgttgatttgggctctcaaccgtttctcggtcgatgccgatagtgccaactgggtgtcacgtacgtttgcccacgttacagggcagcacaagagctggagagagtggttttgggggtctgaaggctttgtggaaaacgttgcgttaggctcttgggacaataccttgagttattcgagccctgttttccaacttctcgagggcttctgcagcttgttggtgatccaggctgctggtcagattgcgagatggctggtcaaccggggaagaagtgacacctgggtggcacgtattttcctcactcccacgctgttctgtgctcatgctgacattaacccctcagatcacgctcctgataatatcaggtgccatcagctccatggccatttacttcttatggcgtgtcatgtgcttcccacaaatcggcaacttcgatgccacgctcatcggcgttgccatgacctcagccttcttcctctgcggttttggcattgccagcggccgagggaatccgatcgagtcttcccttctttttgcgtacacggttctctgtgtctatcagattttcaccgattatcagccctcgcccgaggctgccgccgcggcggaagctgccgctgctgcgcagccggattttccgcctctgccgcccatcctcatggcctcctacaccactctgatccacatgctcagcagccttccgtcggcttttggtttatcattccagtttctctacgcggcattccaaaccatcacccctagcgtcatcatctcgctgacatatcgcaccatcgttttctattgcgctacgagaattattccggctgttagagagttgggtgctcaggctattatggaagagcccacgctcgacgaaagcgatggcgccaaccgtgttcttggtttcctcagctggttttcgccttctattctgattgcggtatacaccagtttgctcctgcagcactttactattgccgatggcgacgagctcggctggactctccgggccggcgatgctggtggcagtacttggcggtggatcaacttgacggccaccatgggactttatgccatcgagttgtacctcggtggtgatggtgacggtggcgcgcactggaagacggactgaagaagttctcccgagagaacattagcagggggccggggaggtcaacggcatgccaatccatggggccatccgcagcatggccgattggaagggctttattgaaactcaagctggatgacaatgtcccaaccaaacgggattcctcgccggatactaatcggcgtcgagaagaaggaattcaaaacggggaaagctatcagaagatcaaggaacagggctactaaaaaccaaggatactaaaggaaaaagggggacaagaggaggaaggcaagatacccaatggctaggaagcgcaggttatggaaaggtgatgcaaaacatatcaccagtagaagaaagataagcatgcaagtcattaacaagattgacttggcaggaccgctcgcacgttcctcacgcacaacatacgcttttttcatttttttttcttcatgactttggctcctttcaatattgtattcatagtaaacaaaccaaacgggcaacgtggatgagaacagggaattgagagtcggaagcaacgtctggctggcttagggggcatcatgttgcaacatcgtacaatcatacagcgaatggcgttggtgtctttttattttcgttttcttggactatgaccgggggccggaactgggactggaatttggctggctggctggagcatgtatcatttgaattttccatatgtctaagcacaattatcagagcctgcctttcgatcataatctaccgcataaccccttctacatgctacaaaattcttgcagcatggcatttctacagtaacacaacacaaaagagacccagtatcattggaaagaaaatgcatcatgtattattcgctaatccccaacccatgcaagttgacatctcataacaaccaacctccctcctcttatatacccccccccgtctatgttcaaaacaacctcaacatcctcctccaagtcctaatcctcctccaatcctcgctcgtcgcccccttcaaatcatccacattcaacatgcccatcccctccccaaccagcacctcccaaatcttattcctcacatgaatcggccaagcaggcagctcccagtacctgctcaccaaccccctttcctttgccgccgccagatgccccctgatcttggccagctgcccagctgttggctcgccccccttccaccactgggtaatacctatcgacctgaagaagctcaccgaggcataataggagttggagctgttatatggggaatcgggtagaagtttatcaagcggggcgtcaaaaaacgcgtcgcggtcaggaggacaggtcgagttggagtatttagcggtggtggtggtggtggttgggtaagggggtgtcaaaatgaggtcaaagggtgtattccccgtgcccacaaccgtcacaggcctcgagtgaaattccccatcctcataaaacgaaagccatcccctttccctcaggggatcaagttgcctcagcacgtgcggccaagtctcatgacccgaggtcttgagatcaatcagcaagaccaaagtctgggcagggtcgacgtcaaagactccgctgagcgtcccgttgtagtacggtgttttggggttttgcttctccaagatgtcgacgatggggttgacgtagagggattgaaacgtgcggtttacttgcaaggaagccaggtcgtggccgacaagcaggtcgttgttgaatagccagacgtcggcttctactcctgtgcaccccgcgtagagggcgtcgaataacgggacgcggcgccagtagtcgttgtgggagtggcaggggagggggatgacgtcccggaggaagtcagttgggtaccaggagagatcctccgtgccggtgttgggttggccccagttgacaaaggggtcgtagtcgttgtggcgggcgccgatgagggagtctttgatggcggagaggaggttgaggaggaggatgagggctctgagcgggggtgtcagtgaaactatcatagaatagatgagtgcaggtataaacaataacaaaaaaaaacacatacaacaatcctactccaagcaccgtaacccgcaattgcaacccccacgacttccacagccccttcttcctctgccctcctctcccatgccgtgatgatggttgcccgcatttgctgcagctcgctggctcaccattcaccgtctccacaccctgctcttcatgctcaagttcgctgctgggaatctcggtgtattccacctttacaccgcccaacttcctcttctcaagtgacgccatgacagaggagcgtatcctggcaaaaaacccgctcgtttggtgttgttgttgtggttgtggttcagtttcgaggatgaaggtggtcggagttggcggcgtcgatgacgatgatggcggcgatggtctcggcggatccactgtctcctccccgacgatctccatgctgctggcagacggccccaccgagaccacttctgggcgcattgatgtgctggcctgtgatttttggattgtacacgcttatagatatggctgttttctgttgatgaattgaggatgttgtcagataggtaactgttgatgtgacctattgtaggagaggatgtggtaaatcaacggctgaaaggcacatgacactcgccactcgatgctgcccttgtacttcactggggaaacagctagcctggaaacgtgtgagcatgagaggtcgagaaggcacaaccagaaaaagatcaaactgggacgaggcaacgagaagaagacaacgtttatagtaatccactggcaattggcccgccggggttttggtcatgaagaaggcgtttaggttggtctggaccctgaaatggttacactcatggcttgctgactgctgcccttaacctgccgcctgatgctgtgtcggatcccacaatgttgttcagtggggtttgggttgcatagctttgacaatgcctattacgaatgaggatactatggggaacggattccaaccagcagcgaagacgacgatattgattggtttgaattgtcagatgggatgaactggagatgtcaaaaggtcagcgcgatatgtaagccccaactgagggttagggtcactcctccacttcagcccactccagcccaacccactatcttatcttatcgtcccaatcggcgcgaccagccaaaaaaagttttggagcagtcgcagctcaatcaaactcgcccatttctgcaggttcaaatcgcattcaaaaccacaaccaccccgatccccaccaacccatcaccaagtcgcacaccaagcacgacaagatggccaagaagggcgcaaaactcgccgcaaaggcgccaatcgccaagtcgcaatcagacggagtcacagacaagaagaacagaagaaagtccaacgacccaccagtcgaagcccccatcgccgaaaccaacgaggacgaagagtgggaagatgaagacagcgaggaggactccgacttggaagaagaagggggcggcgtcgacttttccaaactagaagacatcaacgactccgactccgactcagaaatcaacaattccgactccgaaaacgaggacaacgacgaggaagaagaagaagaatccgaaatcgacgtcgacgacctcaacctcgacgacatggaccccgaagaaaaggaagaactcgccgccaccacccgcgtccgccaaacaatcaacaacaaggacgccctcctcgccgccctgaagcgcatctccctcgtgcccaccgacatcaagaaggccgccttggtcccctttgcttaccacatgaccctcgtcacgtccaagcccacccaagaagtcatcccctccatcgacgacgacctcgagcgtgagctcgccttcctcaacgcggcgcgcgagtcggctctcaaggcgaggaacttgctcaagaaggaaggggtgccgtttacgagacctaccgattactttgccgagacgctccgcagtgatgagacgatggaggcggtgaagcaaaagatgattgaggccgcaacggcgaagaaggcttctgccgaggcgaggaagcagagggacttgaagaagtttggaaagcaggttcaggtgcagaagcagcaggaacgggccaaggagaagagggccacgttggagaagattaatgagttgaagaagagtatgttttccgtactccccattccccgtgcaattttagctaacacacagaaatagaacgcaaagacggcggctctgcctccctcggtgcgagggaagcagacgacatgtttgatgtcgctgttgataacgagcttggcggcggcaacaaggctggcggcaagagaggaaggtcagggggtgatcatggtcctcctaatgccaagcgtcagaagaagaatgaaaagtatgggtttgggggcaagaagaggttcggcaagagcggcgatgcgattagctcgggggatatgtcgggcttcagcgcgaagaggatgaagaacgggggtggggcgggtgatgggaagaagacgacgtttagtgctatgagtgcgaaggcgaaggggagtaagcctaggttggggaaggacaagaggaagggcggggcggggaggaggtaagcccagaggtgggggtggtaaatgtgtaataggaagaagggagtgcctgtacagtgatttttttatggtaatgctacggggcacaataaatgtctagcgtcaacaagggagatatcctggttggttttgagtgtcttggtgttgcttttgagggtggctggtgaggtggtgggtttacttgaagggggtcgtatttactaacaccctactggcgcaacaacggttacatgatggcgagactctccttgtccacaggatctagttcactcaatctgtacccgaaacatgaagccaagacggagggcagcatccccgagctttgctcagcttcggcaaggttgttcccaataagttgagcacaaaggaggattggtcttggcagtttgcttctagaaggaccgagacattgttgagtcctcgacaacaaagaacaaagcgggatggctgaagaggggggttgtatatgggacggccagtggttggtcaattcaacgagttgggttggtgctcagctctttgatatttggggatgtgagtaggagcttagagggaagtccaaagtcaattacgagggcgacgcaaagtagaagagcctcatgatggtgaattttggatttgctatgagtcgatccgtctcggaaaaacatatatacaactccatcaccacccccattctcttattgttgccctgttccattcctcctccgtttcgatagcagacttggttgcgcacgctaccaaccaaccgtttacctatatacccccccttcaggtcctttcccagagcgtatcatcattcttgatccctccccccgttgaaccacctccgcgtcccccccccttccccataaccgtagccacaccattgactgcccgccctacgccacaactaacctattcacactctcacaccagcacccttcccaaaaacatatttcatttcaccaggacacatcactatcaccatcctccccgtcacaagaggcagaaaagaggaacaaatactcaaaaccaatacccaaaaaaacaaaaccaaaaaaaaaacacaaaacgctccattgaattgccctatcccaaaaccaattcgtttaccaattgataaaacagacataactcacatatacacaccaaagagaaaaaaaacaccctttcagagttcaatgaattcgtcttctttttgcctaaaaaaagggaggaaaaaaaggtggggggtcatgatatgaggattgatttgctccaatcgaaacaaaaaccaaaaaaaacaagcaaaagaaaagcaaaagtcgaagcggaagaagaatactactagtaaaaaaaatagggaacatgtttggaaagaaccggacccgacaccaacccaccccatggaccgctcacacctacaaactatatctctgcttcaaggtccattcctgtctgtgttgtctgtccgcccagttctcccagttgtttctctctctctctctctctctctctctctctctctctctctctctctctctctctctctctgtgtgtgtgtgtgtgtgtgtgtgtgtgtgtgtgtgtgtgtgtgtggtgtgtgtggtgtgtggtatcgtttcgcaacgccatgcatgcggaaaaaaagaaaaaaaaaaaagacatgaacaagtgcccacatatatgctttgccccgttctttcaatccccatcccttcctcccaagaacgacgccgtcaaactacaaccatgaacccccaatgccaaccccagtccccaaacgcaacaaatcacacgctgtgccccttaaccatcaaccccctagattttcgtgccagtagacattagggataacgccatgcaagagaagcaagtcccggtattaaaacgagaaagaaaacaagccgggaggggtatcaataatgaccattgttgggaatttctttcctctttcctgttcgcgatgaaattcaacctttgcgcttcggctagctcgcttcgtattattgcgtggcggcaatgcaccagtgccggtgaaaggcccaggcgctcttttggcattctttgctgcagtacttggttcgtcgacagcggcggcatttagcaaattgccgcgtgtactcttcccatttcccgcactggtagtaggcacattgtcggatgccgccgcgggtgtcgtccttccggcacaggtttctcataactaccccggcccagtattgcatatcggtgctgtggtaccggaccgtgaacttttccactaaggggaagatgttgaggtcattgggaagtaggtattcctcttcacatgtctcgtcttcctcctcgagctcggcctcgagggctgccggatcggctccatcaagaagttgaatttccttgccaatcttgagcttaggaaccaggtgacttttttggaagtactttcggaggttgcagtatttggaaacgtaggcgagcagttggagagacatcaaaacgtcttcttccctgggcatagcggcaagcatttgtggatttggtgtgacttgacgatcgagcaggtaacgaggcactgtcgcgtttggcatcgatggctgctgtgggctcaccatcgtcggtctgtttggcgacaagccaattgcaggaactggcgtcggggtcggattggtgacaatgctgccgtctaccggcccttgatgtgtgatgttgaaagtgccggcttcctgagtctcggataccgtgggcgttgtcagttccatggcggtgccagtcatcataccctcgccatcctccatggcaatgtcctgaattcctacggccggttggatttcggccgtctcagacatctcagtatcgggcgtttcatccgatgcaacactttcagcattcatatcatccgactcggcagctgtcgagtgctgatggcggatagatggtcgttggcgagaccgagcagcggcggtgagcatggtggcaggtcgcacggtaggagaacgaatctgcggtggcggaagtggagtggtgggtgacgccggctgagatgtcaagggaggccgagcaaatggcagcggtacgattccaaccaagcgatccgcatcccgtgtcggcctgacaaatccatcggcggcatccatcgatggtacggacggggcaaggatcacgttgggcgtgagagccataggtgggcgagcctcgtgcgtcctgctcgtgtgatggtgatgggggtggtgtcccgccaaaggcgtccgatcggctggtggcgttacctggaattgcggagcagtgggtgtggcctcagaattggactgtatgactgtggtggaagggccggcgaacggggcagacacgtcaattgacggcggtggcgcttgtcttctgaaagtctccaatgcgccggatcttgatgagaaactggaggatttgtgcgcccggctgctgccaccaacccggtgatgatgatggcggtccttgtgcttggcttcctcggcctttgcccgtacgttttcaatgactttgatgtagttgtcgaggattgtggcaatcacggggaccatgtcagcctctaccacccgagtccgaacagcttctgtgcccctaacgcctatgttgacgacacattggaaagccagattccacttccacatgtccatcatgtctttgctgcgaccctgcttcaggatgcagaccaacctttcgatgccgccatcgacggtcaagatgtcgcggatgcgagccgacgatgttgtgaggtaagcgagatggttgagagagttgatcaggggcagggtcgacgtgcaatcgagggcgcgtcggtcgtaaagggcggtggtaatgcccaccgacgccttgttgacattgggtatgctgaagttgacttccctcatcttggctcgcctccacggaacacgaggtaggcaccagacaaggagaagagatgatgatcaggagaggttggccgccgtaattcgatgcccggcgtgcgattgcgttttgatgggggggttagaaatggcgtgccctatgcgttggcaaaagagatggttagagatgaaacgcatttcaaaaggtttatgcgtccataaaggaaggggtagagcgagggcgtaccctactctctaggatcggcagacgccctcgcgaagggcgaaaccagcgtgtctacgtacagaaatgcccaaggtatatagttgatggtaggccgcaaatgcagaaaaagggcgttgcagagatgaaaatgaggataatccgagtcggcgccgaccaaatgcctcagccgcgatggagaggatggtgtcggtgtcggtctgctgtgccactcacgggcaagctgttgatggcaatggacgtgacggtcttgggttgcagcagtcggtcgaatgctgctgaagattcggtgatggagagagtgtttgggtgtgtgacggatgggctcgccgtgcctgatggtgtgagaggctgggttgtctgggttcagttggagcaggcgagctgctggttttttgcagtcttgggccctggagaatgtccagaacattacaggttggcccagcctgtgttagtggctagatggatgcctaaggccaacaccacccgcgcttgtgggcccaaatttgtaccaaatttccaagtctcggcaccacatccgaccgacatcgcgcttgcatattcacattcatcacagggtaaaattgtatgttctacaagagatttgctcttttattccgtctattttactttcatcaccccatcatctccgctgggagacccggagactcgaggagaaagcttccatgtcggctgactaggtacttccaggtacttgttgtctaggggcgaagcggagccctaacagcctttcaaggatgggggtccacggtcgaggtcttttgctgggtgccaaagaaagctggaaggggcaaaattcacaagcagctgcggggtgagatggaggataacccaccaccaactactcaccgaaccctagcacgcgatgccaatagaccacacacactctcttctgaatgacatgggagttcatgcaacaattgaggggggcatctgatgctgaagaaaactagacgccgttggcggtcatcaggtttacacatggagggccattgaagcgtggcaggcgaacggcgccgtttcaaccagctctttagagtttgcccaccatcagatcggaaacacttctcacgtcgacaacttctcctcttctcccctctcctctcgcggagctgcagttggtaaccatgcacaagagccggcgttgtgtgacccgtccacttcttacaccttgatggcccaaatgcccaacaatgtatcgccctcgccgtctgccgagctgttcgggtcgcctgattccccaagcccatcgttcactcgttggaacctgagcgctacctcccaccctcccacctactgcactccaactcacaaacgacagctcgcagctttcatgcattcgtggggtcggtgcgcatatcacgttctcgcagctttacggagtagagcttcaaccgaagcggagaagggccgtgatgccacccctgttggtggttgatcccccaccgaccctcttgaacaacgttcaggcccaaaccgccatccgcaccagacccaccccgtcgcccttcttctttcaatatcactcccttgtgattctctctccggcatttaacggcggcgtagtcaccgccctgcctacaggaaacgcttgcgtagaccagtcagcctgaaacgaatacctatcaccaaaccgcccagatcctagtgtccgcccatcgacttagaaattttaggtgccatttaccgctgacgtcgtggctggaaagcggcacagatctgaccttggggggttccagcccggagaggcaagttccatgatgacacccagtcaaggcgaggaagggtacggaaaaaaaagatcttggttttatagcctgaaatcaagcatttttttcagctcggcatttccccccttgcctcaccgcaaaacctccagcatcaaatacctgtctcagttcagcctcttgattattttgctcaatcgaagactatcatcagcatctttccgcgctgatcacccatcagctgaagatgaggggctttgctaagcctcatccgtcacatacacacgtgaatatctttgacactctacacaagacacacagtatggataccggtccatcacgctaagcatcaccaccaccgacaagccaagagcatgcaatgaggggtaactaccctttctcctcactctcacccccgagctgaaagagaaaggattccacatctcaaaccgggtttttgcgtaatgtcaaacggcagcggatggacgggcggctgtgtctgtgttatttcgatcgaaatgcaagatctttgacattgtctgaagcgctgtaaaggcttgacatcttccgctggtgagtttgtgtataaatatacatactggcggcagcaggaacccgtatacgcctcggcgcttaacaatgttcaacaacaacaaccgccagcccccaaaaaggaactctcagttggacaagagacgcggctgtttgtctcactttcttctttttttcttcttctcgaacctcgatctgacaaagtctcagggttcgatgaatcgaagttttattacaaagagagaacgaattgcgcggttgcggatagctgcaggaggtgggagcgggggggggggaacattcgattcccatattaaaaacatgcaatgcaagcggagaatgggagttggtagcagcagccaagaaggaacccctattctttacaggttatactacctacctgacttacattctgtttctttgtgcgggtgtaatgaggtagggttgtattggatactcccatacataacatatggaaaatgtaagaaggggaggtctgtgtgtaggttcgtttaggtaggtacacaaacgtaggtttcatgtttgggaatttttctagcgtttccatctgtggaagtttgaaggttgggtatgcacgctcggatggccagccagactttgagttttggcatactttttgaccgatcacccgacctacatggtaaggaaagggaagaggcggtggtagatctgggaggcgatatcgccggcatcaccggttgtgggatcgacagttgttgacgccttaacaccaacccaactgcctacattatcttcagctgacgagatatacactacaagagaggggtgtataacatatacactattactttatgacttgagatcgacaagctgtgtgttgtatacacccgttattcccgccttgttgggttctggtcttgtgtccgagctgtcgaaatctccggctccgatcccgggttctgtgttactggggaagcatcgcacgaatctgaacttaagtaaggtgaggtggggataacgaagaatcatgccatgtcaacataaagctagtgttatgacgaaaatggcactgagaataggatgatgaactgcttccgatgtttccattatacgcctttctagctaatcagccaccgagaagcccagctatataacacgagtccagagaaacaactgagtgacctaagagcaaattgtacaattattttcgctgagtcgttatgtgtgtccatcttccatatgtagcattatggattaaatcctttcagctcaagattttgtctcgtcgtacctggaataacaaaaagccgtcacacttcaacactgtaaactaattgtagaagttctctcatcatggaaacgcctgtaacttaataacatcaggtaatcccatattacaactcctcacgtcacgaaacatctatatataagttctgtattataatcgtttgcatgggacaacaaaacactacaagtgaaagaatatatagagccccaaaagcaaaagtcatgattcaacaaagaaagggcagtgacgaatattcagcgccaacttctcgacaagacccaagttgtgactcgactttgtagtcgaagagcacttataggaattaaacaaccaagccgtaaagtcaaacagagactcagaacttataactcaactcggtagctaaagaacattctcaagaaatataaacagccaaccaagtcataaaagtccagcctcaaaactcacagaaagctcaccccccatcttctaacgaggggctacgaaaacctcgaaaggtttcaacgaagaaggatcgaactcggggcctatcggttgcaaaaccccggcggtaggcggtggacggtaaacagcagctctgacatccttaccatttgacctgaccacacaggtgtgtggcgccctggtaagcattccagagctgctgttggaaaggggcatgttttgacctaatatataagccatcgtttgctccttccttgaaggtgtgcacaaagtcgagtcgtgaggtcaagtcgcacagcaacagaaccacaccagacccatctcgtctcacaaagctggagtcaaccagttgatcaaattactttaaatacacagcagcaaagctgaacaacccatcatacccaatatacacaaccaacatacccccctcaatgctatcccaaatcaaaagcccaccaaacgcctggctcaaatcaaccctcccccaatctcaacattaatccccactaaccctagcatgcctaaaatacttcatccccacccacgcaaccaccacccaaacccaggccatcacacaactaagtattatcaacgcaggataataccccacaatcggcaacgtcggatcatcctccaactcaggcggcgcatacggtgtagtccccacatcccacgcccagctccaaacccccaagcagctccccatcccaatcacaaacaccgtccacgtcacaatcaacaccacccacccccaccactccgtctcggaatagtcccagtctgagtctggttgtggcaggggtgtcgttgatagccctgccagagaggtgagtgccagcggggacttcgctctctgaaccgtgccgcgacggcgttggattgatgggaggattgatgagcctgaggtggatgatccgaggcccaacggtcggggagggctgtggggagaatggggggggttgagaaagtaagattctgaccccgaggcggaggagacagaggctctttccgggcggaggaggttaacggaggaggaggtggacgagaggttcgatgttgatgaacccggcccggtggggacggccatgtggagggcgtcttcatcgtctgtggtgctgtagcttatacttgggcttcttgagccggtgatgctatttcttgagctgggcgtgttggcatttataggggccaatgcggcagtgggggttgcgtctggatcggacggttgggaaccacttcggctggcatatccgtccatgctgggtcggggtgtgaggtctgatattcccagaccgtacggtgtagatgtattaatagaattcttcaagataccgctattattctggaggtgtaatgtgtttgatataaccgaggtcggcgcggtgccggctgtgacttggattggtgtcccgttcggttcgccatagacgttcaattttgtgtcgattgttagtccacgatcccgcttttctctttgagcaccccgccccaacagggcaacctttcgcaacgatcctctacgtcgtcgtgtttttagcggttgcggctgctgggtttgatgttggataatgtgaggcaacggcgggggcgcagcgttgggcgcacccgcgtagcgtggatgagtgtcggccggtatggaggtgaaagagggcgtgggaggaaatgttgtgatctcggtctcgttggtgttgcggcgggatcgtgggcggtgttcgcccgagtttcgcataaaaggtagtttcgaaagcaagcctccagcgccagagctgctgcgcttgcgaccgggcgctggacgagttgggacggaagatggcgtatcggcgccggcgcctgtgaccgatgacgactcgtccatggccaatgggagatatcggggacctgaatatggcgtaggagaacagacagtttccgaacaaggttctggctaggaggaagatgtctgtgtcgcggcggccacagggcgtcaatggcgtgttacccctcgaaataatagggcacgtccaaacagggtctcagatccatctgtcagggcaagccggtggggtggactggcgttgaaactgctgttttgggaccaggaacaagacatggacattcacatctcgagatggaatttgatggattgaggctcaacaacgcgagaaatgtaacatttccaaccccctgcaaacgttaggtgacaggccacccggcgccatcccggcaggcaacgtacccctgaatttgatggtttacgacccacccgcctcccccaggtccctccattggccaacactgaaatcaatgatggaggctatgagacaacggaatgagacaatatgggaagataggtattgcagattctacatgttctcttgcatagcgctatctccaaatccagtcaaagatatcaaagacgcaaagacgtccacagcccagcgcatctggccttccccagtaggaacctcccgcaaaacggtgtaaccccacgctaggcaaaaaggggaaggcgtccaggaacaccctggagatcggacacgcccagctccgcccgcctcgaacactcctcgacgacgaacgaaccacctgctgcccacagcgtgcgctgtcgatggctccaggtccaaagccgtctcttcaacctccagggacaccgccgacgccggtttttgcgattaccggtcaacacggcgagccctcttttcactttgtttgcgacgattttgatctggatcagcaacaacaacagccaggtcgaaatcatccaaacaacgaacccgaggcaaccgtccgatcagagccggaagccgcgcccttttcgtccccggtacagcattacctcgcgccctccccacgaagcagtcctgccgccttcctcgatccctactctcaccacccgtcgctacggccgccgacgcccgatcatctcttcaacagcatgtcgtccgatgggggccttgccgccaacggcggcgatgcgcctgccatgaagaaccccttcaacttccaaacccagattatctcgtctggaccgatcaaatctgtatgtcttcggcctcttcctatccaatcactcagctaacaactcgcagaacatcggccaacgccgcggtcacagatacaaacactcctccatctcggccactcaccaaatcttccaagaaccaccccctcgaccgccccccgtcctccccgcctctctccccatcccaaccctccgagaagcctggtcgagcatgcagcgcgatcaaaaagccaggttatggtggtgctccctccacgccctcatcgccctctacgtcttcctctcggccgaaggctccctggccatgacagccctctcccacctagtcttcttcgacgtcggctccgccgcagtctgcgtagcagtcgacgtcctaggcaactttgaagtatggcgccgctcctcgatccggcaccccttcggcctccaacgagccgaagtcctcgccggcttcgcaatgtctgtctttctcgtctttggcggattcgacctgatctcgcactccatgaaagacgtcctcgaatccgtcggccaccacgcccctcaccaccccgtctcaacaaccgatgactcctcccaacccgccggcggtggccacggaggtggtggtcacagtcacggagcacgatacatcacccccggcaccctcgacctcgcctccttcgcagcctttgtttcaaccctcatctctgcctacggcctgcgaaaccacggccggatccgccgtgtcatgcgcgtgccgctgccgtacctctcctccctcttacccgaatccaccatcctttccaaccccttccactttctcaccctcttcttttcaggcatcatgcttgtcctgccgctagtctacatcccccacatcatctggctcgaccgtctaatctgcgcgacgatttccctgtctatgttttttctcggggctcgtctagcagtaggacaagggtttatgctcctcatgtcgtacaaccacgtcgacagcaagaaacaaaagggggacagcagcgaagtcgccagcgtgatcaaggagattgagagcgagccgcaggttcagagggtggaggaggcgcagttttggcaggtgcactatgggcttgcgatggcgaatctgaaggtcaaggttaaggggggggagatgatggggggagggcaggggcaggatggggcggtcagccagttacggcagagattggggagggtggtgcagaatcggttgggggaggggtatgggaggggggggagtttgaggtgggaggttactgtgcagatgagtagtgactgattgggtaggggtcttgggcagcgaaatgggaaggaagagagggattgtacatagctctgtcattgtggggtgggaacttacatggcgttattggatttttatatatatatatattttttggaggatgggtttatattggatgagataccttatatagggcgagcttacaagttgagcgttttgaaggactgctgttatcatgtcgtgagtgatgcgggtgaggttacatatcacttgcctactcctcagttctgtaggcaccttgatggatagtacccctgacactcatacacacacacacacacacacacacacacacacacacacacacacacacacatcacaacacacatcacaaccccagtactgatcaaagtgttccaaatctgaaagcttgaattcaagaataattacagacatatacacaaaaacaagaggtatccgatcccgcttattccacttcccaaccaacgctgaaacaagccaaaccataacttttgactccgcagtacgccaattgtgcccgtaaccgacctttgcccaaaacagtatcccccaaaaagtcaccagcaaccctaccgcagcgctaactcgggaaacatcctcgcaatcttatccggattcccatactctgtcctcgccggcgtcggctccggcgtcacaggactggtatcgctcaaatacggccccagcatccccgcgtgccctcccgcatccaccgcgctcaagctcgccctcttcttcttgatgttcccctgacttggctgggttggtctcacagtcggcacctccggtgctggaggagccccgccgacaagcgtcgagcttgactctgaatgcgagagtggtgtccgtgttcttgggacggttgaactgctctcttgacgggcataaggaaaggtagggatcgtggggccgaggaggcgtttttgtgggtggttttgtttgttctcttgaggttggggcgcgcaagctggaccgcaagtggtggatgggccggcgatggtgggaattgggcccgagatgccggcgcggagggtggttttctcgttggccgagaggccgcgggctcggacaaaggctgccgagcggcggtgttgggggttgcggtcgtagtattggtctttgatgggatgaaccattactgtctgattgtggatggtgaggattgagtttgttgggacgttgacccagttttctatcgcacggatggttagtttgggacaattatggggatcgggggtgaacatacctcgctcaaaggaaaggggctcactggctactagaactacatctgcccccttatcgctgcgctccatttgatagtccctcttgtggggggtgggggcgcgggtttcccagagtgtgcccgacgagtagtataaactggcggcttcgtccgaggcactacctacgtagcgggtgcagatgacgctatggccgtctgatacggcaaagttgagtaaacttctggtgtcgacattctcagagtggataacgctctcgggaatgttgtcgatgagttcgttgatgatggcaattgtcttgagcatcgcccttctaagaaccgttggcccaaatccatcggctggctgggagctggggttgtgtcccatgcgctcgagtgtgtccaagaacaaggcaaacgcccattcactgtcggtccctcccactactccaagataccacttgtcggccaaccgctcgccgagcctcctcttgatctgcttccagccgccgatgccaccattgtgcatccagatcaagctgccgtgggagaatgggtggcaattgtcttcgctcagtgacccttcggtggtggcgcggacatgggcgaagataaggtgagaggctgtcttggaagccaatcgttggaggttgacgcagttccaggctggtgtggtcgaggtgaagaggcagggcgcagcgcctagcttggggtcggtgtagaagccaatgccgaacccgtcggcgttgttttgaccacgtcgagtgtcctgttggaggtgtgtaagttgaagtcttttgtcggcgctatgcttgctcgcgtggtactcaccagccggaggcgagagtcaaatgactgcttgaggatggagtgtgctgggtcgaggactagctttgaaagcaagatctcgtcgctccctttgtagacctgagcattagacaccatacgtcagtaaatcatttccccaacgagaaccgccaaagtatatggcgcatagcggacataccaggaaccggcacatggtgatggcgcccaggacggagcgggccggtgagtgttcggattgggcgacctaatggatagattcgggacgggacttgctgggctgagacgggggactcaatcgatagatcggagtcagttgcagagtggcgtgtagagaaggggagatagttgtgaattcgctgcaggaaagcgaattggggtggttcgacagcctattatggaagagacgagacgggttgggacagtcactcgaggcaagtccctggctcgcagggctgacgaaatcggccaaatcaatggcggaacgaacccattcatcttagcgcagtacctaaagtctggggtgcatgctgagaccaacgctgtaacggccctaccagggcagcttttgtttgatccaaacaggtggcatgagcctaaaatcgacctggaaacttgtaatcctgtcttttgtgttctcacacccgatagttaggaagcatcgtggtgtcttggttgagtaaagctcagctcactctgtacctcactatcacaggaccctgggttctggaaccacaactgggcccatgctggttcatcttatcggttcgttatcgccgctcaacatatttcggcattcctcaagcaacacagcaacctctgatcataaagtctaggagagatttttttggcttctctataaccatacaaacacgcctgcttcccgcagatatgactgctgtcagcggtaacttgcttccatctgccacttgccgcaacgtacgcaatacagagagacccatcagtctcagaccaggattatgtcagagagccattttgtctctcagcgtttttcggaggcgctcaatgacgtgctccgggctccaatccgatgaagccggaagatgagactaattgctcgtacggagtaatgttaaatcgccatcactcttgcttctttgtggaaactccgaaactctcgccaaaatgggcatcttataaaccccaaaagtcagaatgatgcctgacctgatacgtgcaattcagggtctgatgatcatgcgattaagccatcttgactgaggggcatgtggcgtccaatgcaataatcgtggcctcccagtgtcccagtttctgctgcgtggggtgggtcttggcaaccccaaatgcattgctacacagggccgcccaaagcaccgcggtccaaatcactgattgcccattttccatgcacctcaacccctccgaactaagataatcgcccgaccgacgaccataaccccccattgtctgcggactggacacctgcccgagacagcttcgtatgcgtgctagctaccagaccccccgtttaccatgagcgcacagctccgcgccgccggggcgattgcccccgtcgcccgtcgcgtcggtctgcgagccgtccgccagttccatcagtttcccaccggcggcatccagagagccgacctcgccgcccgtgacctccggaggtctgtgcagttcccggccaagctgtaccacaatgctgtcatggtgcggaacgcctcgtttgtccgcctgctgcccaagttggccatcaagttcgtcaggatccccgcactgttcggtgggctgatgttgggtgcggcgggatgggtacaatatcaagctatccgtaaggactttggaatatacagactaaaacgatgtaaagctgacaggatatagaactgggtaactctgccaccgaaatgtacacaaatatcaagactggtgtgacggacaccgttttcgccatatggggaaccgctaccgatatcgccaaccagaccaaaattggattcaacgaaaagaagggacaatttacgatgccagaatggctggacaatattatgaagggagagggtgccgccggggaaggctcggaaggaccaaatggtgggcgggaacccccaaagcaatctagagtggccggcggtgctgctgctgcaggagcttccgcggcagcttatggttacggtgctgccgacgaggaggacgatcgctcaccagaggaggttgtaaaggacgaccacatgatgtacatcaccaagcggatgatcgagattcgaaacctcctctcgcgagttgggcaatccagcagcgtcaccctgccatccatcgttgttattggttcgcaatcatctggcaagagctcagtgctggaggctattgttgggcacgagtttttgcccaagggtagcaacatgatcacccggcgcccgatcgagctcacccttgtgaacgacccccaagcgaaagtcgactatggcgagttcccagatctggggcttgcgagggttacggacttttccttgattcagaagaccctgaccgagctcaaccagtctgtgcccgagtctcagtgtgtgtctgacgaccctattcggctcaccattcactccccacgagttccggatctctctctgatcgatcttcctggctacattcaggttgcgggcgagaaccagccgcgtgagcttaagcgcaagatctctgagctttgcgacaagtacatccgaggtcccaacattatcctggctatttctgctgctgacaccgatttggccaactctactgccctgcaggccagccgtagggtcgacccaaggggcgaacggacgatcggcgtcatcaccaagatggatctcgtagacccagagaagggtgccgccattcttggcgacaagcagtaccctctccgtttgggctatgtcggtgtcatctccaagatgcccgtccagactggtggtctcttcagaagagagagcagcaacctcctggcaagcatcaacaaaaacgaaaaggctttcttcaactctcacccggaggagtttggtcctaactcaggggccgctacgggcaccatcacgctgcgcaagaagctgatgcatgttttggagcagcaaatgtcctctaaactcacagaaacaaccgatgccattactcgtgagctcgaggagacaacttaccagttcaaggtccagtacaatgagcagcccatgagtgccgagtcctacctcgccgccagtctggatgacttcaagcaccagttccacaactttgccaacacctttggccgccaacagctgctggaactgctgaaggattctctggaccaaaaggtgctcgaccaactcgctgctcggtattggaacaagcccatcgaggatcttttcattgcccccgctgagcctgacagtctggttgacctccccaaggccgaccccaagtcgccttactggcaccgccagcttgacacagcctgctccggtcttacgcgcctcggtgtcggccgtctcgctgctaccgttgcctccaatgccattcaggcgaacattgacaagctgctcgacaagtcgtcgtttgcgaagcacccatccgcccgccaggtgatcagcgaggccgctgctcttgtcctcgctgacagggcgtacgctactagcgatggcattgagatctcgctgaagccgtacaagtttgacccggatattcagcccaacgagtgggagaaggggcgggagcatgtggtgggtgttcttcagggcgagctggagcagtgccagaatgcgctcaagtcattggagagctcggttggtgggaggaaaaagttgagggaggtgatgggctttgttgacaaggcgaggaagggtgaaattatcattgagggagatcaccccagcggtgcgggcggtttcagcgcggcgctgcttgcgagaggtaaggtctttgttccttttttacgaatcccaccagtgactaacaccacctttaggccgtgaagccgtcttcctccgcgaccgcgcggacatcatcaacatgcggattgttgcttccaagtcgagaaagtgcaagtccctcgagaacaagtactactgccccgaaatttttctggatgcggtagccaccaagctggctcagacggcggtgctgttcctcaatgtggagatgctgaatgacttttatcatcggttcccgagggaggtggagacgaagctgaatgagtatatgaactctcatgggggcaacgggctggagaagtttgcgagggaggaccccaagattaggaggcacttggacttggtgcagaggaaggagttgctggagttggtgttgatgaagattcaggacttgcaccggtttgatgcggcggggaatgtgaaggcggatagggattatttgaagaagggggggcagcagagggggaggtggtcgttttaggggggtggggagagagtaggcgaagagggtgaaaattataggggatgggcgggagtgagtatatgggtgggattgggaaagggatgggaaagggaaagatgggaggttaggcgtcaacaaattgttggttggttttcttttttttttttggttttgttattatgatgatggtgtttgatgggagttttttttggggggggctttttggcttgtgttttggttttataaagaagcaagtaaagttgggcaaatgaatgatgtttgggtttttttttggttttactatacaatgttttagatgttaaaataggtgggtagagtgtgaagtatgccttgcgtttttagccatggttgctttttgtcctgagtcttgtataggagctgttcaatggtggtgttgatcagggcgagataaagtgataagaggggctatcagggtaggtagggagtgtggcctcgggaaggacccaacttgagcgtgtgtctccgcgcaattccaacacgccttgaattctccggagagtaaggtggtgattttgtgtgtcatggaattgctcgctgaattagtacgggatgtgcttgattttatggaagtgggagagatgccgaggagtctccggtttatctcctgcggggaagctcgcaacagcgggcagtccagcgatcgatcatagccacggcgtaacgtaacggatgaaccgttgtgatcaattgagtgaggggttcggggagatggaggaggtgaggggtcatgacgtgcgtttgttgagggatgggtaggtgggtatgagggtgtatataacctggctgtagagacttttatctcagttcagacgcacggattgatgtcacgagcacgctctcaactttttagtccagtattagaacagaagaccacttcacaatggccgactcagccccccgcctcgccgccctcgacgtacctaccccctccccgtttcactttcccctcccgtacctaggtggctaacctttcgatcggtaggactccatcgtctcccgcctcccctcctactcccaatccctctttgcggccaaaaccgcccacgagctctccttctcggcaatcgctgaacacctcggccggtccgaggttgcagttgcggcgctcttttacggacaggcgacggcctcgccggaggatatcaccaaactggcggagctcttgagcttgcccgaggcgcagctgaggaaggatctcgggactgggttccctgatcgggggaggtcagggcctatgccgccggttgaaccgctgatttataggttgtatgaggttgtgcagaattacgggtatgcgttcaagagtgtgattaatgagaagtttggggatgggattatgagtgctatttgctttgatacaaaggtggagaaggagacggtggagggcgcggattgggttgttattacgctgagggggaagtggtatgttctcgtctctgttatcatgttaccctgtcagggcatggaagatgtgggacggtattgactgactttgtgatttgcaggctgcctttcacgaggttctaagtgggcagatggtaagacgggatagtaggggatcgaactctcatggaggactcctcattcaagggttcgagtgcttcccaggaagaggggaaaagtcacgatggctggcttgtgcctgagacagaacgatcaaatcacacaaagatcaggatctggtgcctgacaggtgttttctggtttcctttcatggtgtctagcaaagatgttcgagacaacgggcgaggtaacggctgaagaatatcatgggcgaattttcaagttggattgtttacttgctttcatcggtatcgccgtggcagaatatcacgggcaaaatgttcggctagaattgttggctctctttcaccggtccgaggcgagccggcgacaggagctcgaggcaaacactttctcaatgaacctttgcctatcaccaggactagatccaaggttttcttaccttgggctctctgacggcaaagacgcgggatccacaatagtaaggggctcagggggtcacaatactaagatggccaccaccgaacagctcttttgtcaatagctagcaaaccaaagaagccaacttttttcatgaaatcaaacatctactgctcccacgttgtaattacgctttcccacgtgccgaagcttcttttctgccgtgtgcttgccttgatggttgtttgtctcccgggggataatgctaagagcacaatactaagacccgccgcctgatggactctgctctaatgattctcgagttgtctgtctaaagtcaatgaaactcaggggagatcatctccaaggatcaaagaaaccaatttggtctagcttgtgatcctgtctcttgtggcgggtggccatggaggaagatggccgctcaacaccacaactcaccggtttgtatggcattcagcagcctcaaaaaaaagtataaaacatgtcctaccctccccctaaacccatctttttttttcttcatccgcatccacttctgaacatcttcagtaaaacaaaaaaccaacaatcaaaatgccttccaccaccgctcagaccaaggttccccagacctccaccaacttcaacagctactgcgttgtcatgtaaattgaccaacatggtatgctaaaaggcgcgctccagcactagaagcaggcaagagagagggagacttgtttctctctctcccctgaacctccatcttcactcttttcggctgtatttcgactttttcatctgccccaaatgacaacaagtcttcctcctgtgaacgtacgggagtggacttggatggattcgagctactttcgacaaggttgaagcctcacaggttttcctctctcttgtcccacgaaatcaacgctactctcctctctcaataactggattcgttgctcttttgggtaccgcctcagtgtcgctgcctggaaggtacgacaacatcaatcggctctcaattttacccccaaaaccgatttttaaaacaatcacaaaaacttcaactttctggatccacctttttgaacataaacacagaaaaagaacaaatcgggctcacttttcatggcctgcttcttcacaccaaactccttgctttctcagacaatcaattcttttcgcttctttgacgacttgttccgactcgaaaaacgacaaaaatcaccacttggctttttttgccctttctttgggaaggacagttacatgggcaagagaatttttgggaggggaaccaagggggaagattcagacgtggattggaacctttttgcttctttttcttttttaacttataacttcttcttgctgtacccactgcaggactagatagattcaatcgaggctggttgataaaaattccttgatcatgatggtggctgtgactatgatatgaggacctaaaaccataatctgactgataggaaaaacatccatggtgtctctcctcgaggttgtgaatcactgcattgaaggttgacttgcactgacatcacccctcctccatcaaccccaccgttcggttcaacagccgagacggccccataaccccactgccccacctcgactcgccaagccgctagtcttatcttatctcaatggtggggataatttttgcaattgcccaatcttgcctggccatcccgagcgaagctctctgcgaccgcaaacacaacactatcacggttctcacaccccccatcaccctcgagaacagccgccgccacaatgccgcacaaacacacccgtcgcgagaaggacgaaaacacgttagttaaattctcaatcttccccattcttgacgcaaactaacaccctcaccagcttcgacctccccccaacccaaatagccaaaccactcccacccaccaccatctccaaaaagaaagaaaacgagaaaaacaacaagaaaagaaaaccccagcagccaaagaagggcgatgatccaaatcagcaaaatgacgcccccaaacccaaaaagagaaaacgcggcgacaagaatgacgatgcgcctcgtgctttcaagaggttgatggctatcaatgaggggaggttaccgcgctcggggttggataatggtgatgcgccaaagaagaagaagaagggaggggacatcaggaagctagtggaaaaggcgaaggagacgaccgcagaggagaagagggaagagctcaagatcatgccgggagagtccatggccgagttcaaccagcgtgttgatgctgcgctgccgattagtggcttggttaccaagactaagctcaaggacgggaaggatccgttggggctcaaggtgaagaggacgttgaaggagaagaagatgcataatatgtatgccgagtggaggatgattgatgcgaagatcaaggagaagagggaggaggaacttgaggagctggaggagaaggagatggagaatgaggccatgggggtttcttggaagctggagcaggaagctgggaagaagaagaaggggaagaagaagacaaagtatattggggaggataatgggcccgagggggatccgtgggcggagatcaagaagaagaggaatgaggggaaggttgggttgaatgaggttgcgcaagcgccgcccgagttgacgaagccgaggatgaatagcttggtgaggggggcgaaggtgcaggttgcggatattccaaaggcggcggggagtttgaggcagagggaggagttgcaggggattagggagaatgtggtggagcagtatcgcaagctgatggaggggaggagggcggcgttggctgcggaggggaaggagagggatgattagggtagatgggtgaataatatgtgtgaagtgtatggctggttcttgtggtggtagcatttggtgatttcggctttgagtgtagatattcaaagctggccaagtacaccatgccaggcctacagtttcagccaaaatatgatcttgtagataccaatgaccaccaactcaagccaccaagtgctcgagtcaatatactttccttcattcatggagctcaacggtggggcacgaagatacaaagagctccccaagtggtaatgaaacgagggccaaagcttccttgcaatgccgtcccccaccttgcctcggagcatgcttcaactgcccctctattctgcagcaaaaaaaaataaaaaatcgcacccaccctcccatcaccagtcatcttcattcctctgcaaaccaccaattcccgagacgtcaaaattcaaatcacgctgcgacacaacatcaattcgattttcaccactcgagaatggtgcagcgcgcctcgtcacaatgagcccagtcggtttcgaggtctttattgaaggcctcatatcgcagatcgcctattgcggctcagaaggtacgtgaacatctctcctgaatcacccttccatcatcacctcctggataacagcaccacgttcgagactcgcgtcgtcgccaatttttgagagtcgcctcggtcattgatacctatggaactcatcaataggacccttttggaccagtttgcctatatttcgcgtggcctgaccgaccgttcaaggttttgctggagacttacacggctaacaattgccgcaggcatcactctcacacagctctttgagttcattcgtgaatatcacggcaccctcgctcgcgagagtggcaaaacccacccagaagtacccatcaagtcagagggtgatgatggcgaagacattgagagcacgctcaccgatgccgagttggcctcggcgcggttggcttgggactggctccggtccagaccgcagattttgattaacggccatcctaagaggtattggaatttcctcgagttcgaccaagtcttggctctgcccaaagcggcgcccaccggtggtccgtccgagtcatcggcaattgaccctcagttagaagctcccgccgccaaatccacaactgcgaaaggcaagggaaagggcaagggcaatggcaaaggcaatgcccaggtcgagaagcccaagaagagccttgctgtccgacctcggattgtgccgtcaaaagaagttgtttggcagaccttgacccatcacggtatcgactacaagaaggttccgcctctggagtgggcttgtttacagggcattgccacagcaaagcaccatggcattcttcagagcaacctccgaaagcttgtcgatcaagataaacggtctctacccaagagaacagattcactctttaggaaaggttacattgtcaaacgaaccgtcgtagttcaaaagatgaagacgagtatgctctggctggctgactttgccccgaagacggtggataacgacacgtttggtttggacttgaacccccaggctctcgagaagttggcgaaggacaccaaaactgtctcctggcattcgaaatggacgggaacaaacattgacgtggcggccctcggcaaaactattgttggtgtcgtcaaggcctttggcgtcatgcgttatgccgatctgagaaccaagcttggagtgtctggcaagccatggcagatgaagactgttgcaaagagttgtcagcggtttgccgatttaggagtcatcaagtatacagctgcttgctttcccacgactcgcaaagtcttcaaagactgtctcaagttcgttcgcgatcccaccgacgaggagtggcagaggttcctggccactggcaagaagacgtcccagtattcggatcctagcagacaccgtgagccgaagccaaatgcgctcgcgctttacgaaaattctggagcgcggattcaaaaccattggactccagagaagccgctggctcagacagtcttcgaggtgatcaagagcgcaggcccaagaggagcctcaaatccccaggttagcgttgccactgtcggctaccaacatcggcggtacctgtcaagctacttgacaaaagttgccgaaacgcggcagcccgcccacttgacccagtttcaggtcaacagcgagatgattcggatcggcaaaacctctgcctacatgtacagggctactggcgggcagtctaccggtgggcaaccactcttgacgcaaacagcagcggcggacaatcctggctctgcttatggctttggagaggttcggcccaagatgtttgcccccgacgaaaagaattcactcagcgccctgtctctgatggcacaacccccgcgccaggcgaaccggaagcaaagccacgttgctgcacagttgagaagacaggagcaggccctagaggaagccagaattgcgtcgatgcagtctattgctgaagaaaccccggcggctgataccgatacggctgatgcggcgccaaaggaggctgctattgaggtcgtcgaggaagctgttgcagctcctcctcgcccatcactgaagcggggagcagacgagatatctggagatgatcgcccaccggagctgtccccaggtaccgtctacaaggtccgtatcggtgagccacactcgctcaacccgcagcggaggaagcgtggtgctcagagcgattcgcttgtcattgtattcaagaggcaaggcgatgctcccttcgtaccagcttcaaccccacagagatggagcgaacttggaaatgatggcgccacagacaacatgacggttgaattaggggagccgtcaccttcgacacctgctccggaagttacagtggaagaggttgagagggccactcctactcgcggcagagggcgtggtcgtggtcatggtcgtggaggtggccgaggtcgtggccggaaggggcaaaccactgttgccaatggacagaagcagttcgtctgcgaaaagtgcggaagttcgtggaagaattcgaacgggttacagtatcacctgacggccgggcagaatgcctgcaatacgaatttcgatccttcacacaactttaacaagcgccgacccatggaacctgtctcgacacccccagttgagaactccagtacaccaaccactcgaggtgtccgtaagactggggccacggctaccaagctccgaagaggagctcttcggccatctatgagaaagcggcctgcagacgaagccagggaaagcgagatggagtttagaggtgttgaggttgctgccattccggcgactgctcaggttgggacggttattccagacccagacccgccggttcagccttttcaaattcagagcgggttgctaacccagcggaactttgtccagcagtccagaatgccactgggtaacaaagctgcgcctgccgcacctttcacttttcagggccaagtcagccccccccctcaacctatggacttggacacccggccgatctcagctgctaagcccgcgacccaggctttaccaagtatgcagctgacagcccaggctccggcccagcatgtctacaatggcacagctgatgttgaaatgcctgacaagcagcatgatgttgcggttccggacgagcaacaggacgttgagatgtctgaacagccagacgaccagccagtcggtgtttcacagtatccagatgtgcctgatccaaatgctcatcaggcgttcaacccggagaatcgcgtgctcacactggagaagacagaagcacatccagccagcactgcgccagcgccatcccaagactctcagggcatcaagtccttcgtgccgaattactcgtcctatgaacaactcgcaacgaacgcgaaggtgcggactgccatggtttttgatatcgtgcagtatcttttggacaataacaatggcgtgtttcctggtgagaaagctgttttttatgccgcacttcgggtctatttggcgacgttcccgggaaccactccaccaagtctaaagaactgtcagactgccatcaactcgctgcaggctcgcaagttgatagacatgcacacttacttgttgaggaatatgcagggcaggatggagacatacagcgtactggttcgccacggcatggatccttctgcagaagccgtcaaattcaccgcgcgaatgatcaaggaagcgtttccgggactgtacatcccgcctgcgttctcgcctaccccggaagagatggctgatttacaggagactgacccgaaatacccaaagggggaaagggacgcacgaccaaatgcaaatggtcagaagtttcgggccaggaggcggcagatcactgaggttgaggttttcaatgccccgtactacaatcagaacattgctggccagcctgtcaaggataccttgcggcctaatcacctgcggagccacgggaatgtcgggcagaagaggcaagccccggaagacggggctggggccggggcccagagctcttccccgaaacggcacaagtcgaacggggggcatgcgactcatccagaaaatcaaagcgactcactcgtggatcccgagcttttcaaaacgtcgccccctcaacaatactacccgcttggcaacatcaaccacatcgacagcattcacaggccatccatcgttgaagccgtcaagcacttccgtctcttgcccacacggggcggcagcaagatgcatcacaatgcccggccaagcaagtcgccaacgaagatacccgaatccctcggcaggatcaagaacccagggttgaacagtatgccgacttggtttttcaagaagggttcctacttctacaatcttaatgccaatcccaaccctgagcttgtctcgcctacagttaaattcttggagcccaacgagagcctcgaggttgacgatggagagtttgagagtgatgaaaaggggacgtcgtggactcccgagcttgagtcgaatgatggcgaatctacgggcacggattgcgacgaaattactgtggtgttggatgaagaggttgagaagccaaaggagtgcacgtttgccgagagcactacgctgacacaagttgcggatggggtgtggcacgagcacagccaaaagcacttcaagaggcttgataccagcttcactgttgatggctatatgccgacccggaagtggcagcttgagcagaacatccccagaagcattgagactatggcgaagaagagcgacttggatgcccatactgactggaaagacaaaaagtatgcgctgttttgcacacttatcgacaaggtctcagactgggaattgtccaagaatgggtctaccttgctagagtctggcagtgtggcgcctgatttcatcatcctcaacatcactcccaagcatggaatgagccatatgccggtcaaggcccgctttaacgaccagaagcagttcacgatggacacccttgattaccaggagctggagtctgatgacgatcatcaagagctcttgcccggggcttttgcccacaggaagaaacgtcttggcaggcctcccggttctaagtcgcagaccactcgcactcgctctgggaagatcaaactcaaagagatcaagaccaagcgcgagcatactggcttcccgcagtgcccagaggacttccttagacagccgggtgacagggccgaagggctggactggtcaagtgagaatgtgcgtctcgctacttacgttgccatcggtacactcctgggtggtacttctcgttctgttgattggggcttgattatgaggatatatcctgagcaaacgtaagttctttgtttcgttctcgagagagtgaagagggtgctaacagtttcacagtctcagtcaattgcggcactactggggtatgcttaggaaagatcgcgcgtcgagcattgtcatattgacggccaagtttcacaagaagttcctcaaggcttacgaggaggaagagttgccgcctctcgactttgacgatgtgcttgcctacgactggcttaagctcatcaagtggacgaccagactggattgggaagagaagacggcgttgcccgccacaagccaggccctggaggagaacttcaccctgactcccgttaggcacgaggaccgtgaatggcgcgaggcttactatcacccccagcgatccgtctttaaccgtttccaggacgccacatccgagccgttggctgtttcactggacaaccagcccaagcccaagccgtctcaagatatgatggtcgccatggcctggattcgctcgctctgcgtgacgcctgtccaagagaagctagacgagaagttggtgcagaagcgtaacggcctctatccacacatgagagctgtcgagatcacggagctggtggagagagccatcgagcagcttcagcgcatgcacgtcatctccaagtcttccagggactgcagtaacggtcgtcagtggcgattcaacactagagtgtttgaacagcttgtcaaggcggccagccaggagaagtttgagcaggcctatcggtacaagaagaagctggacgaggcgttcagagccaagggtaagtcttcggttcgtttcaaggctgacgacaagggcatgacgatggtgcttgtcaatatgcaagccatgggccgggttcgcactgtcatcctcgaccagaagaatgtgcccatgggtcatgagcccgggaactatgaaacgagaaagtatcccaaggagtacatgcacttcaagatggacatcattcccaccgacaagtatgtctacgatgacgacgccgagcttgtcgaacttcgagagaagattttggctgccaaaccgcctgctgcggggccgggaggggcggttccggtctggatgacttgccacggcgatctgaatgtggacatgtggatccagtacctgagcgtggtggtgatcacgctggcttcacgtggcagcatgaggcctgacgagctggtcaagacagtcaagccggtaattatggagtttgaggcggagctgatcatggattggttggagggcgtgggcgtgctcaaggagcagattgccgggatggcgagaggtcttggagagtggtggtggactgtggtggaggtttccaaggagggattgactgctcctgctgagaaggataaaggaaagggaaaagaagtggagcaaagtgctgccggtaacaagccgagaaagtcgttgccgagtggtaggcccacggttactgcttgaggaagtttgagggatgatgttttcttggaacttttgtgcatcaggatactatgttgctctcccactctatttgtagtggatagaagagctaggaaatatgggggagggaacagtcatgagagagggaaaagagggctttttgttggaggttgggctggacaggattttcttcgtcggcattcttcttcacttgtgataccccctggtacctcttaaggactgggactttcattttgggcgtttgtggagcataggagatggggcattagcggattgggggagtgtgtgtttcttgtagtcatatgtgtagaataatggttggttttctggactctgtgttcttgtgatgcttgtgttgaggtgaaaggatgtgctggatgtaaatgtcgacatgtctcgacttgccttcttgatacctatcgacggctcttctgtctcccaccgaccaggatgggctgctggtttgttgcaagatgggtgtgcttaaactgatatataccgagtctgggaacctcgacggatgccctggggcgtgctgacgtctgttcactgtaaaagcccaagttgaacaaaatttggacatatcagcaatcaaattcccagttccatgtcctgtctgttccatattccaccggccagatctcaccgcgatgctattgtaattacaaaatatctgtgtcaattccaacaactccgttcccttattatcccaccccaccccctgccccatcaaagcagttaattcaacgccagttcccaaaaatgcagttccccctctcatcctcaaccaagcattaccctcgccacagccgcaatcaacaacacagccacagcaataatcaacctatccaaccaaaccgggggcccatcctcgtcagttctataccccctcctctcctccgccaacaacctcttcttctcccccctcacatcaaccccctcattccgcctcatcaccctttcatcaggtctctccttatcaaccctcccaagccctccatctacatcaatactctcaacaaacccctcccccaacctccccttttcttccccattactcttcnnnnnnnnnnnnnnnnnnnnnnnnnnnnnnnnnnnnnnnnnnnnnnnnnnnnnnnnnnnnnnnnnnnnnnnnnnnnnnnnnnnnnnnnnnnnnnnnnnnnnnnnnnnnnnnnnnnnnnnnnnnnnnnnnnnnnnnnnnnnnnnnnnnnnncaacccaccccacaaacccacccccttgactcccccgccaaccgtctcctcacttcgcttcccgcttccaacccccctaattgccccttgacatccgtctccataaacgaccgtaacgcaaccaaggctgtcctaatcccccaagcaggctgccacgtctcttcgtgatggccgctgatgctgaggcagatttccctgtttacttcgaatctgccggagggggtcaggaatcggaagctaggcgggcggagggggtaggaaggcgggaggttgatacggccgtggtagagcccgttctcgtagggggaggagggggggcctaacagggtgaagtgccattcgaagaggtcggtttcgaggggggaggcgaggaagaagggggaggggtggttggttagttcttgggcttcttttactgcacacacaacgcaaggagggtcagtgacgggaaagggagagaggattgggtgggggggaaaaacatacaaatgcggcggatggtgggggatttggagtttattttgggggttgctggggtcggcatggttgaggatggtgagaggaggtgttgataggtagtaggtggtgtcgcgtgtgttgttgggagggtaatgatatcgccgtttgatcaataggtgataggtaggttaaataggatctcgtcggtaagtaagcaagtttcagtcaccaacacttgtcgcaagctccaacaaaatgcaacacctgtctccggcggcggcggcgcaaaacttaaaaagtacccgttgtgcaaaaggaaaagttgtgaagctcgcagaaaggatgacggaatatccgtaataatcttctgtccgaggataggattgaggggcagcagcagcagcagcagcagtaacaaagcagaagcggccaggttgcaacaacgaccacccgatgccactaaaattaaatgaatgtttgttacggagggtagattcgatgtactttcgaagattaattaataagataaaaacttgcgcagaggagagaaaaaaagatgatgactttattcaccccgttcctgtctctccgatagactagttttcagaagcagctgagacaaagctgctgctggcttcgttgctgaacgaatgcgcggacggatctgattaggaatagcgctggtgcgatggcttggcaaggagggagtggggatcttcgggaaggttgctcagcgttggtgtcgggccgtggattgggaggggaatctcggaaacatcaccagcccgaggatagtggcgagactctcgacaaacaccaccttctttcacgctaaaatgtttctcaaaagggatgttcttagtagccccaaaccacctgcagcatccaccatgcctgtcggttcaccaagtcaacttcaacaacaactcccagctatattaccacaagccacaaaactacatcaccccccccattgtaatttaatacacccatttgtccctctcaaatttcccaccccaaatgccatggtgaacaaacgctcgcttcgtgctgctagccctacaaatatcaaatgtaaaaaaaagaaaaaaaaaagaaaaaaaaaggggtatcccatcatcatcccacgctttcctccctgtctcataaaaacttcaacaacaacgccagacacacagcaaccagaaacaaaccaaaaaaaaacatacatgatgcacacatccccttcccatcccttcccattccttcccatcccttcccatcccttcccatccctccaaaatatccctcccatcccctacctcaactnnnnnnnnnnnnnnnnnnnnnnnnnnnnnnnnnnnnnnnnnnnnnnnnnnnnnnnnnnnnnnnnnnnnncttttcttgccggagccaaatttttcattttttgactccgacaggggggctgtcaagaccattgatgggagggacaagaacatatggggggttttttttgttttcttgttggggggttggccattacggcttcccccacccccccctcaatttcaaaatttgcccccagcatcccctccgccacaatcatccacaacaaattcccgctcttcctcgcttgcgtcgcccccgccttggcacttttcagcgcttgctcccccaccacattctcaaacagcttacacctcataatattcaatgccatgctcaaatactgcgtattgttcagctgctgcgctcccgaaagccccccctggatgtgccgtttcgcttgattgagcgacagctccggttcaaatgtgctcgacgccaacaccagattccaggccgttctgatttcaagatcgggatcgtcctcgcagatggggcggaggaggtcaatcaactcggccgtctcggcgctgtcgcggtggttgggttcttgcataatgtacaccctgttcagcgcggcaaggatacacaattctgtctcgagccgggagccattcttgtacgcccccgtgggatcaagctcaaaacgggggttcttccagatggcgagcgcttcgtccatgttggccatgccctgctgctggcagccttcgaggtagagggttaagatatcgaccgaactgcccggcaagggggacgtgtggggttgctcgtggatggcatcaaggctctgctttactctggcccagtcggtgactgtggctgcctgaagcccaatgagaatgtgggtgtagcaggttagttctctggcccagtcgtgttgcctgagggcttctggaaggggctgaggagcggtggagactttggtgtcgtcaaggacgcggaggccttcgttccacaaggttgcgctccggccgggggtggtggctctgtagtgggcgacgatgccgttgaagacccagctgtgatggttgtcagtctagttggagcgactgcaagaatggcaggaaatcttacgctatagcccaagcctcctgcttccccaatgtcgacaagaccagatagtctgcattcccctctccctgccgcaccaccgccctcgtatcgttactaaccgtcggcgccgtattcgacatccggttgatagacaacaacacctccccattctgaagcggccagtccggcgagttcttgagctcttccagctgtctttgaagaacagtcaacttttgtgccgcaacctgatgtgatttctggtgaagactgcaggccaaatcaagcagtcgcaacagtatatcgatctgtggtatctgaatagacgactccaactgtatcttggacacctgggcaacacacaactgcacccggttggcccagtcatccttcatggtggtcatgtgggcgaacccttctaacagcatggccatggcaaaaatcgaaaaatctttgcgctggttggcaaccccggcaatttttcgtagattgtcaatcgcgccgtgttcggctggagatccggcctggagatggaacgacgccttgaggaaccggaaagcatagatccagtgaacatgtttgtaagtcccgcaatccgaaatgtgcccctcaatgagcttgaaagcagctttgggatttcgttgaaagagcgtcttcatgaggagaaactgagagcagtatttgagatcaagaaatcggttctggtagtacctgtcagcgtctggttccatgcaacggtaggcaacataaacttaccttgtcgcaaacagctatccctctcgtcagggtcgtttctgcctccatgatgttggtcgtttcatcaatcaatacgctggcatatcgcaaacacagcctcgcttccagtcgaggccacaacttgttcgacttgagagcaacatccagacaccccaagccagtcgccactaatttgtggtggtccgctacttccgcctcagacatggatttggcgactctttgagacgccgtgtttgccttctcgaaacagtcctcggctacagatattaaaagggggagcgtttcggtatgtgccgaggaactgggcgtggctggcgactttgcaactcctgctccaacactaggtcgactttggtcttttggtattttcagtgaaggcgccgctcgagaaggtggtggtcgctcattgagctttgggctatcttcggcaaacggtgttcgctgcgggggtctcgcaatcggaggaagctgtgatatttgaggactcatcgttctcacgggaggctgcaatgccggtggtacatgactcgtaggtctcggtgtggcaggtgattgctgaaggtaggacgggttgacaaattgtacgggagcggccgagggggtgggtatcggtggttgcggtggttgtgatggtgaaggttgagtataggtcccattactgtagtttacatagggctgcggctgtggcgcactcgaagccggatagtattgggcagtcggctgcaccggcggttgtggttggtgctggtggtgttgttgtgccggtggttgcgggtgcgggagcagaagttgctgcggttgcagctgtggttgcgattgtgggtgctgctgctgagggtatgcgggatggacatattgattgtgttggtactgctgctggttcccattttggtatccatttgcatatgggggataggtagtctgcgacacgggtggcagacgcggatgtggttgtccctgtggttgcggtaactgaggtcgttgctgatgctgttgcgcctggtgttgcccatatgcgtgttgctgagggtggaattgaggatgctgcggttgatgtccaccaccgtatgcctgccctggcggcatcgtgtctcgatatgtcatcgcattggccggtccccaaagagtctatatcaccctttcttcacctttgattccggctggcggcgcgctgtcgtgcgcatcgattgtcgtcgagtgcccgtccttggcctccaacttcgagtctcgaacagtctccaacgcgcgccgctgcacatggatgtgggtgctgtcatgtggagttcaaggacccttctggatggaacaactggactccagccactttcgctgacaaaaaagcacggagatcaaattgtggcgttctggatgtggctggtgtgcctcacttcgtacacatgctcatgttcccttcaattcaagatcacaaaatgacacaaatgtccggtgcaatgagcatgaatcaccggctttgttccagagttagcaatcagcctataatagtattacgagacggacttcaccggtaccactacatgttctgtccgcggaatgaccggcactatctcaatccttaaatcacattttcagcgggcaaacaatggctcttgaatcagtcatatcatgtcacatagcagaagatatcaatttttggttccaccaagggtaagtgtgaggtcgattctggtctcaatatctaaagcccgtccggagggactactggggttttatatcctctcagcagcagggtatactccgagaatccatcgtgatatccctccacatttccacccttttcatcgtcatcaagacgacgctacgcttagtgaccagcgcggcgagactcagcgatgacacggttcatgtcctcgaccttcgccttggcacggccgaaagtaccgagctgggaagagaatgtcagcaaccgagaacagcttgtaaatagactatcagggttcctaccttcttcttggcgagcttacgggcacgcttgtccttggagttgcggagcaattcaatgatgcggcgctcatagggagcgagactgtgtttgcagttagcgaccacccttcaagtccaccagaaccatacgagaaaaagaacatacccagcaacctccttgacaaggtcacggacgaaggcagtgcgcttgctaaggtgacccttggtgcggctaacgcggggcttggcgacgcgggcggtggtcttctgtgttcagtgaaaaacggtatcgattagccaggtgtccatcatccgctgttatgcttcgacatctccatgttccaggaggaagcagcgcggagatcctccacgaggtgagacagaagaggctttatcttacgtggcccttgttgagaccctgtgaagcaaaacgttagcatgttgatttttgacactattttcgacatcgcgggaaaatttgagattgcgaactgcgacaaccacgagtctcgaattgtcctgcgaatgcgaaactgatgagcgcgtagacttacggtggcaatgccagagcggggagtctccttggtagcggccattgtgctggttgatggcgtgaatgtcgtcgtgacgttgagcggagaggaaagggaaatcggagaagttttggagttttgtgtggttgaagttttcagggcaaaagttcgagtggagctcaagagcttggcggggaccaactggcagtcagctgagcggctggtgtcccaccatctgtggctgcacttcccgcagaggcttggcaatacacaggggccttcggagcttgtgaacgtcagcttccaattggtgatgagcttcaatgacaacttggtcccaaaggccgctcccaacgtggggtttacaacatagcaactacgaagtacagatgactccacgccaaatctcttgacgaattccccgatataatactgtacatctttcagccgctcggactctgtagaacgagtccaaatttccatatcaggcggagcccggggataggcggcatccactgtctggcgacgtcaccatcagtactgcgcatcttcgtccactgcagcgcaatagcgagagcagatgcaataacccctccataccatggctaccgatactccagagccttcagcgactcaactggcacaagcactcgtcgaattttctttacgcggctcttttccagaagaaaatgtatcgtcactgcctctcaagcccgatgcgctggccgaagctatcaaggccctcgcagatgccagagctaagctccaagtatgaggttctcccacccaactgagcacaatatagggatgctaagaacgatatctttgtgcccgagcaggcagaaattcatgcgatcaacgaggataccgccgacgatgtacgagcatggcaaaccaatgcgcaatctgtccaggacgacatgatccggtcaaaagcgctagcaaacgaaatcatcaaaacttctgaagcaccggcagtctcagggaaggatacccacgatgccgaggcaaaggccgagtttctggttcgggagctcaactacaacgcccaagtgcaggaagctctcaaaggaatcaggacagtcaaccgcacactcgatgaagttgagaaagcaagagatgagcggaggatattggatgcgctacacctactcgaacgatcatggaaggaacttgatgccataccagtcaacaaatcctgtcgggcaatcaaattgctggatatcagagcttttgaactcaaatccgatgttcatgaggttttcgaccatgtgtggaacacgcttatcaatgttgatgttgagaagcatacggtctctatgagcagcggccgggatgatgaacctatgagtctctcggatgcggtgataggtctgcaagcctacaaggagcttgacaggcgtacggctcagctctgggccagccttaatgcggctgtcctcgttcccagaatggatatggagagagagaccttgccgggcattcaaatacaagatgtaagtgatccatttccaggagatagatcttgtctaacatcaagcagaacactctggaagtaaaaggtacgacagataaatctgtcgagtctttattcaccgatctcgaaaaggtttttaggttccttgttgaaagattacccggtgacttggtcgagaccatttcccccacccttcttccaggggtaatacaccgagtaaccagtgtatggcttgattcggccgtcccatcgtctttgaacgacatggcgaggtttcaacaagtcatcgctctcgccaaaagcttctgtgcgacactacggaaactgggattcacaaatctgggagatttacaagagtggacggaaagtgccccgagggtatggctctccaagtgcagggaagccgcattggatgcggtccgcgcaaagctgtcgaaaggctttggtgaaccgacccgggtagaaaagatcgagaagcagatggtgtcaaagtcagaaggtcaacaaatagcggccaatggggccgcagctgttgatgacgatggagaaggatggggtaatgcttggggtattggggatgatgagccaccaaaagaagagccaaaagaggtggagaagaaggcagctgccaaaccggcggatgacggtgacgaggacgtagcggatgcttggggatggggagatgaggctgccgaggaggagcagctcattgaggagacacggaagaagaccgagatggaagacgaggatccggcttaatgtttggggtgggggtttttttttcccgctctgcggggttgtttttttttttttnnnnnnnnnnnnnnnnnnnnnnnnnnnnnnnnnnnnnnnnnnnnnnnnnnnnnnnnnnnnnnnnnnnnnnnnnnnnnnnnnnnnnnnnnnnnnnnnnnnnnnnnnnnnnnnnnnnnnnnnnnnnnnnnnnnnnnnnnnnnnnnnnnnnnnacaacctgtcttggacctaatagcagccattgtggaagatggtgcgactctgacccaggacaggcacgcgagtagcccggtagcagcagccgcggctggactgttcggtgtgccgactcttgcgctggcattattcagagccatctcgcctcactactacgctccaaaggagggtgggaatatgtaagtttgaacccccctcactcagtttttgctatgttgttcattcctaaccggcatgaaaaaaaggttcctctacaatgacgcaacctggctatcggaaaaactagcggatttctcggccacctggaaaacccgccatgatatcagcacccgagcgcaaaacatgctgagactagacaacgacgtcaaggctcttcaagggtttgccaaccgcgcctacacgaacgagctcagtctcaaaaagatgatgctgcgggatcggttggggggtgagcaaaaccttttgcagctggacgacacggaatcctacgttgcgtcggcggtctcgatggttaggtcgatagcgctggagtgggagcccatcctggcgaaatctgtgtggcagcaggcggttgggtcgatggttgacgcgttggcgtcgaagattgtttctgatgtgatggatctgccgtctattgggcaggaggaggcgtataatattgcgaagcacatcgcttccgtggaggagctggatgatttgtttttgccgagcaagggggaggtgccgttgacggcgcagtttgcggggagctggttgaggttgaagtacttgagcgaggtgctgcagagcaatttgaaggatgtgaggtatttgtggatggagggggagctgagcttgtattttggggtggaggaggtgctggatttgattggggctagttttgaggataatgcgaggacgagggaggtggtgagggagattagggggaatccgaggcctaggggggagtagtgggaggttggagagtacgttgttcatgcagcatcgttgttggcgaaggaagcttgcagccaacacagtccagacagtatagatgtgtagaatggcgttctttttagcgttggtcgatccgattcgcatgcaagccattgaatacctacctggttatttattgcggagggtggagtctctgggttttttgttgtccctgtttctccagaggccagcccctcttgatgtgttctccgaggagctctctcgctcactaggtttttccagttgtctagacgtctcgggcataatctttcacgatctttttttgacaggggttggcggtgctctttactagataggtaaggtgaggcgaggtatctcgatcaaaatgtgcacttgaacagttttgcatgttttttttcctgcagaggagaaggaaggaatgaaagatcctccccagcccgggttcgctttgatgcgatctctctttctctctctctctctgtctctctctctagcactgtattacgcgcgcgcgcgcggaaataaccattgttcgggggagnnnnnnnnnnnnnnnnnnnnnnnnnnnnnnnnnnnnnnnnnnnnnnnnnnnnnnnnnnnnnnnnnnnnnnnnnnnnnnnnnnnnnnnnnnnncattgtgctggaaagtaagttgtcagctgcgcgctttttgtgttgcttttgagagaattatgaggagacagcaagacatggggtgtgggcactgggatgaggtgtgatgagaggagattggagagagagcgggtaaggggtagtcagaaaaagatccgtcggtcgattttattccctccctccctcccttccttccgctgtccgtttcttgtctatgggtccacgggggagggataggacccgttgccttcttttctccgctaccgctaccgcatccgttcccgtaaccgtagcgtacccacttcatccattgtgctgggtctgttcttgctctatgggatttggaaacgtgagatgggattcatctcatgtgcatgttaggatcgaggagcctcttactgtcgaagaaaaagaattacgagatctatgtgaaaagaagcaaacagctgcgaggtatcacttctccggctaaatcgtgccgtctgtttaccttgttgctctgagagacaatgcggccatttctgcagcgtcctctgagacgagattgtcttcaccttgatacatgtccgccttgcccggtctcccagaatagccacaccgactcaccgactactatacacaagcacagatcagcaagcaatatattccagcttcactttttcctgatccgacaacagccaaggccatgatccgagctggctctgaaacaaagtcaccggcaaacaaagcaatatttcaccgcgctggctggcccatccatgtcgaggcaggaagccttgtgtgacccgagagaatagaacacctccaagcctcgggccggcaagttgcatctcgctgatcggaacggccggcattattccttcttttttctgttctttcgctcttttgttcagccaatcagcttcaaaggattgtttcccctcaaaaaggatcacacaacagatcaaaagaagaaatgagcatatgcaaaccaggggaaagaaagggggctgggaggggaaccgtccattcacaaacggtgatataccgacatgatgcatgcgtagtttatatacatacataacagctgaacaaggagggtatgttgtggatgaagagcttcgtactgtaaaagtaggttgacgtatattatattttaaactatgcttcaaaagatacttgataggcttgtatagatagttggagggtcttgaaaagataaacaataggccttgaaagatagttgagaggcctattcgacgtggaggggtgagggcgagagtgagtggttgaaatgacaagacagaagcctccatctgttcgtcggtaagcaggcttggactgaggcaagctgcaagaatgtagagacgcagagatggcatagtgcgaataaatgagcccaccagcagccatcatcaaagttgctcaccaccgaaagaagcaggtcaaagattaggtatggtcgggtatgtccgtcctttcacaggtagtacagcacagagtgatagctgccatgccaaagtccacgatacttgacgcgagagagccaataccgaaacaggaaatccgtctcatgtctatcctcagatgcaaaagcaattgggcattgatgcgagttacatacctgcatgcataccaagagagcagactcaaagaatgatgaactgccgcttgctgctgcaaagtcccaaagccatcaaggtcctcactttgcagcgcctttgcagctgatgacctctcggtgttactcattcccagtttacttgtgatacctacctgaaccctgtgccacctcttccccagattatctgagcaacttatctatgtgctcgtacacagggtcaatctcaagcagtatgtccagcctgctgactttgtttgtttggaaacattacccctgagcagacccaccattcccccctgtcgtctcctcgcctcactttaccacaatgcttccaacacgccttgttcaacaccacccatccatcctatgatgtggggaaaatattgaaagccacaaggagcttccctgcccatcaatctaaaaacatccaaatctatcaactcactgcaagtacccgctgcttgatcatacccccatccttgcttgtgtgccctccccaggccagtcaagcttcacgcccctcctcattgaccgctcctttcttcctgcaacccccgcgcaggaaaagagacaaaacgcctcaaatgtctctgtccctcctgtcgactgtcttgtcagtcgcctgtcgttgtcagatactgagactttgctcggcaggagaggggaaattatgcgggtagccatatccctcatccaaatgccaccctctccatctccatcctggctatcttctttttgaccgctccaagatgacgtttgcttcgcggttacctgcttgcttcagaacgcgaaagcgagaacctcgccgccctgtcaaggggtcaaccccgcgacggctgggtgcattctttcatgactgctcgaggctatcaaggtatatctaagaacgatgtcagaggcgccatgtcttgaccgtcgtatgtctcatcggcggctgttgttgagtcacgtatcacgctcagggaatctcggctaggtgcttgcatcttcgaggccatcaaggccaggctcaaggtcacaagcaaatcattctgcttcgataaggtagcctcatgtgtcgctgtctcgtcttgcttggctgccagcactatcggtccatgatgagctcaaggttcaagggtccactggccagttgcttgcatgattcttctcaagtccgtcattctgtgctggctgattttggttctagccgcatccgagtgtcttgcttgtcactttctcatgacaaggtcagggttcatcgaaaatactcgacaaatacagactccagaccacaccaaacattgtttgaatcatgattcccagctaccgactaggccggatcatgtctctcatgtcgttggcatgatcaaggttcagggttctagactcaggggtacttggcctttctctctcaaggtaccgaaactactctcaacaattgtcgggaccggtatacagacagcacacattcgagggcatcacaacgacatgtctcacctcctgcctcgctgcccaaacctgcaacctgttgctaccctttaccgaccgagagcgacccgtaccggcaccatccgtcccgtgcccgttctttcattatctctggcgttcttcaccgctggtctcacacctagtgtagcagtgaagctgcccttgcccagcccgtgatgatcttggaatcgggatagaaagtaccaggcagtttaagcaggtattcagaacccggtcgcctcaccggtacttctcacctcgtcccttcgttcccgtcttcaccggtggtctcccttaaaccaaactttccaacgaaacaggtctgcaagtaagagttttctgcatcagacacgcaattgtctctgttcagcctagcccagaccagtctactcggcatcggcaatgttgactgaaagtgatccgagacctcgtgtaacccgggcacaaatgagtgctaccgacgacacatgccactccctaattcccgacagcctaccgaccaacaccgaggcctcctcatgatatctccgagcctttggttttgtaatcagctagaatttgtaacacacaggtttgctatcatcagtcagccatctgacgacactcaaacaaagaccgggaacatctcaacacctcgagcattgcatctatgacgaaatccggtgatattcccgagcaaaattactcccggcctcggacaacgtttggtccagactgtcgggacgatctgtccaacaaagcaaagccagatggcagcaaagaaaagccggagtaagccccgagtttgacctccgacctcggtggctaccgctctaatcatttctcgacgaatcacaatcaggggctagaaaaaggaaggaaaaaaaatgagaaatgcaagatgcagcacccggggcaggtacctcgctgtcgggaaagacaatattggcaagacgataagactggccgggctggcaggggatgaaaggcacagaaagaaagaaggcaaccattacctacattgcttccgaaatacagccaatcacacagccctcacacagggagccacgaaaaccatcgtacttgcagcgatattttctttgctggttccagcacaggcaagtaaaagtgcaaaagtgatgctgtgtatccctcatcgtcgttccctccctcatacctacccgcccgctccatccatcccatcccaaaccttcctgatcagatcaaccaaaatctcaaaatatcactcctgcttactctcccggagaagcagaccaggctgccatcgggtacggtcaccacccccttcccctttccttctagtctccccgagtagactcatgcgggaccatgcggcctacctgtcgtgtcacccggccacatatgtacagttcaagaaaggaccgtagcatatgtgtaggtagaagcacgatcctacatccagcccccagtcgcccaatgattcatgacatgggaggaaactgcacgaatgcacttggctctcatctgccgtgatacacgacgccttatttcactttgtctgagggaagatcaaagcagcagtcagtcactgttttttttctttttttgccgtgacgctggaaacatggtgtcgggtccaaccttggaaaacagaaccttggattggaacagtcgcttgcgcaaagttgatcataccaaggactaaccaaagcaagaaaatatgcaactgtaacctccgtcccatttccggcactcaaacacaggttctttgccttatggccgtccaccgctcgctcgggccggagctgcccggggtatccggtcttatcgtttgcaattcccgccctggttctttctcttcccgaacaagagcaagcgctgaacgcatgaaatacgataacaaaaagcacatcacttacggcgatagcgtagcatttccagtctcaatcttactgacgtgtcatgcaagcctgtcccaattcgaatgatgtggagcagcggtgaagataccgtgcagcttcaagctgcttcctacaggagcaagaccgacctccgacccccgacgacgtgccaaccaaccagcggaatatcctccgtggacttggaatccatccgaaaagaagaaacacggcggcagttgacgaagcctgccaggcggtgcagtcgtccgcagtccgcagtccgcgcacgatgatgaggcatccatcagccccaaccagccatcatcttcggaagcaaccgagatcatctcaagacttcaatctcgggctctgtcacggagaacaagagtgacacgatatgccgaggcctcttacaacaacctcaaccgcctcactgctggctggcgtaaccacctcaccaccacccactccacgtgccaaagccaaatctgatatctttggccatctctagtattcttccttcaggggggtgttgtacccgtactacaggataccaaccaaccaaccaaaccaaccaacctaacccacagccagccttcctgatacagctgcactcccccacattcaccattatatccatcaacgcctaccaccatgcgtgacactgactgacacacttgctgcccgctgataaggaagctacggcaacaaagctacaactgtcactcgctactatacctactgcagagttcttctttgacaataataaatgcaacggcgatacaaaacaatgacattgatacctcatattgccgcttgtcacacatgatgttgctcctttacgcaaagaaacacggctgaccaacctgtcccctactcatctcagcctcacccgtttcaagcatctattctcacccaacaagacaagttgtagggctggataagctcacatgacccttcctcacgttagctcacgttagttctcacggggacatctaaaaacaacggcattgctccggtgcataactccgatagcagatatgacagagacagcaacacctgctttggcaagctcggttttgtcagaccgcctgatggttctgaactgaaaagatagccttctgcatgggcttgctttgcatctgatatgtcgggttacacaaagcccaaaataccaccttgagagaagcacaaagaaaagtcagaaagggaagggccgcgagaggcgagagatctattgggtaaggtaatgaacaggaggtgtgacgatgaacacactgcaaagggcaagagatggaaagaagggggggagaatgtgagttgcatgctggtgtcaaatgtcaacatctcttcaacaacataaggtacaccacactacaacctgcggcctgactcatcaccaggagtttgtatatccctctcacccatgacactctttcattagatgcggcagcaaataacaacaccaggtatctcattgcctaagtcagccataacctcaaaatatgcactcacgatgcacccaagaccgctcatctcacaaagccctcatcaccttcgacaccaagagacatgaggagaccggcgaacaaccacgaagtttttacaaagttctcagaccccttctcacctctgcatcaagccccctcctgtaaagccccaatccagccatccgattgctgcgatcgacccaataaggctgatttatactaacatcttgtgccgatgccgagggggatatctccccgttattattcacgagggacaacaacaacaacaacaacaacaacaacaacaacaacaacaacaacaacaacaacaacaacaacaacaacaacaacaacaacaacaacaacaacaacaacaacggcaacaacaacggcaacgacaacggacatccgactgcaactaactgaccacccactacaccaacaaagtaactacaagtaaagggctctctcataagatgtatcaaaccataacccccgtccagtaacaaccgcagagaggaaagcacgccacatctccgcagatttggtctttttggagaaaggttgagaaaggaaattgtgcaatttgacagctcacattccgcaaaaccccgtgccgcgccgaacaacacgcagagagaaagccgagcaaagcatgttacctactgccgtgtgtgtgtgacctcctcccccttttttaatcttttttttctctttctttttccgaagacagaacggaagtaacgttttgtgtgagtttctaaatatatgtcccaaagacatcctggtagctatgcactcctggacaggacaagactacctatactgcagcctggcttttgtctgatgctttcaaggttccatacaacagacggcataccccgactgagtagtgcacttaatgtgaggcgctgctttgccgagtgcgaagaccatgcaacaacacagcaaagcacgagagagaggcggtgccactccgggatcgaagatctcaaccacatctcgaccaaaaaaaacccaagcatcaataatacctactggcaacatacttttcgggccgtcttccctatggcggtcactggcggtgaatcgaaacccctagcaccctcacttactccccctccttccccctgataataatgagccgacttttccgttcccccacaattgaagccaagtagccgtgttattcaccagctcctcccctacccatcccaacgtacgtcgtataaccccccatcagttgcctcacctctgaatgcgagatgtcagtatcataaatatttgtcactttcttgttgttttgtcgcataagccaccatcactgccctgcaggccttgtccgttaaagatggtcatatgcattgtctcaacagacctctcattgtcttttcagtaccggtgtttctcttcagctgctcaacttttgtcacgtatcacttttcttcggtctcccccaaagcagataccaaaacatcaaacggcaacttccacccagagccttgtccagtaggtagtcacttactgttggtacctgtgtactatcaaacaactgaccctcgacgacgactcggccgaagctgcagtctgttaaaagcgtgacacgttacacccactcattcttccccgtacccccaaatctcgtagtcatcaacccctacacatgaccttcccacacacgcaagccaaaaatcccagccaggctcggaggaatccaacttgtcgtcttatccttcctgtacagcaggcccttagtgggtgaccctacctaccgcgtttagcctcctccaaaaagtagggcgaacaaagatggatggatggttgggcaagtgtcagatagatcaaccaaaatctcagatctcaaccccatctccccctcaagtggttggtgcaaatgtgtgtgggcgcacaactcactccccttctccttcgcccccccccccccccccggttccttcactgtctcaacaacctcacgaaacccacccccttttcctaaggaacaggttgggtatttcaaacttcctttcttctgtatttttttttttcccannnnnnnnnnnnnnnnnnnnnnnnnnnnnnnnnnnnnnnnnnnnnnnnnnnnnnnnnnnnnnnnnnnnnnnnnnnnnnnnnnnnnnnnnnnnnnnnnnnnnnnnnnnnnnnnnnnnnnnnnnnnnnnnnnnnnnnnnnnnnnnnnnnnnnnnnnnnnnnnnnnnnnnnnnnnnnnnnnnnnnnnnnnnnnnnnnnnnnnnnnnnnnnnnnnnnnnnnnnnnnnnnnnnnnnnnnnnnnnnnnnnnnnnnnnnnnnnnnnnnnnnnnnnnnnnnnnnnnnnnnnnnnnnnnnnnnnnnnnnnnnnnnnnnnnnnnnnnnnnnnnnnnnnnnnnnnnnnnnnnnnnnnnnnnnnnnnnnnnnnnnnnnnnnnnnnnnnnnnnnnnnnnnnnnnnnnnnnnnnnnnnnnnnnnnnnnnnnnnnnnnnnnnnnnnnnnnnnnnnnnnnnnnnnnnnnnnnnnnnnnnnnnnnnnnnnnnnnnnnnnnnnnnnnnnnnnnnnnnnnnnnnnnnnnnnnnnnnnnnnnnnnnnnnnnnnnnnnnnnnnnnnnnnnnnnnnnnnnnnnnnnnnnnnnnnnnnnnnnnnnnnnnnnnnnnnnnnnnnnnnnnnnnnnnnnnnnnnnnnnnnnnnnnnnnnnnnnnnnnnnnnnnnnnnnnnnnnnnnnnnnnnnnnnnnnnnnnnnnnnnnnnnnnnnnnnnnnnnnnnnnnnnnnnnnnnnnnnnnnnnnnnnnnnnnnnnnnnnnnnnnnnnnnnnnnnnnnnnnnnnnnnnnnnnnnnnnnnnnnnnnnnnnnnnnnnnnnnnnnnnnnnnnnnnnnnnnnnnnnnnnnnnnnnnnnnnnnnnnnnnnnnnnnnnnnnnnnnnnnnnnnnnnnnnnnnnnnnnnnnnnnnnnnnnnaattcccccctcttctcattcacccccctctcccgctcctcaacccttgccggccatgcgtacatatacgaactgatgcaccccaggtggtgcagtccatgcaaatatatacccattaggacaatacatacataccaaacaaacaaaccccccgtctgtttccaagaacgccacaaaaaaaagtttcctctcaaaaataacctccgttgcctgcccccagaagcgatgaggggagaccaccacacgaactgctgacctgtctcttcttgccggattgagcgatttgcagaagccgtgaatgcaacaagcaggttgacgaaactggctgggccccaccaattcccgcccgctgctgcgctgtcactttgatatgatgaggagtgccatgtcgataaaaaggcaagtcgacggacgggtttcttgcatggtgcagcagcaaagcaagcaagcaacgctttcgtgcccacttcccccccccacccgcccccaaacgcacatctccagatcgcaaaccaaaggctggatctcggttgcttgctcgccctcacatgtctttcccctatctcttagaaatcaccaacctcatgttgccttatcccgccgggttgagattggccagagagagagagagcgagagagagagagagagagagagagagagagagagagagagagagagagagaaaagataaaaaggaagagaacgtgtacagaacaggtgtttgctaccatgcagcatgcagcgcgggatggcttgaagaactgctccatattgaaagcgggcagagagcaggagttgacgaatgtcgttgaagaaaaagcatgcttcgaaacgccccacagtttttgtttcgctgcagatgttctgtgcaagcgaacaccaccccctgtggctgatcggaacctttttttaatcccccaccaccacccctccaagaaaacgactccagacctccagacctccagacgacaataacatcccgcgcaatcatcaggccatgagctacggccggcacgacctccgcggtagtagaaaacagtatcttcgcaagtgccgcggggaagatcgtcggggcagccggcttcagatcctcagtgggtggcacgcaatcggaattcttgatgaagttgctttgcatattcgcgtgtgtgtgtgcgtgtgtgtgtgagctggcgtccatccccatcacggaatccattgctggttccgcgtacctcttctcattgcttcttttcgttggaacagtaccctctccttggacctgagaaacgtcacggcggtccatcagtgcagcttgcagcgggacctcccgctctcaactcggcctatcagcccccttgtagccaaagaaaggtatgataaggggctgtgccaaaccgaatagtattcggtcatgtccattcgaaagacgacaaacacttccggccttgttggtccgtctgccccgggccttcattggcacaggtcctgcaggacagtgagcccaacacaaaaaaaaaaaagaagagaaatattgggtgctgcgtactgcgtatggaagggatacggcagcaccgatagctcaggggaaaccaactgttgacgatgaaaaaaaattctctagtggtagcaaactacacgtagctgagaagggttttgcaacccgcatcgagtcacatagtcggtgagcgtttcaataagtcggcatttccgctcttgcgtgcgtgatgagagaaaccatggccggttcgtcacattgggcatcacgctgctggcgggtagaggggggatagagagggagggccaatgccgtgagagcgaggccggagtggaaagccgtataggggctgttgtgacccctttcctattgagcccacgaggcactggtatttgcgccgacgaaccaaaccacctcacatcggcgggttgtgctcatgacttgccattggctctgcagtatccgactgctgcgcacagcgtgtgtcaaggcaagacagggcagatcaggtcaggtcaggtcgagacagagaggcatgacgtggtttgctgtatcaaagtccgtgataggcttgcgagggaggcaggtcccctggttccgaagagggcgagtagacataggtaacagaggttgcatcgagtgaggaacaccgtgggcatttgccgacattccaatgattcagcggcgagctgccacttgactgtgagggacgacggcgctgatgagattatcgagagagataatctgcggcttgccaggtttgaaaccgctcgggagttggacgttttgggtaacggcggctaacacgccatcgtcgccgatccgttgtggggccatcccgacgccggccactaacggtgcaaagtcccggttcatcaggatgcggggcactcgggcgtgtcggggtttccaggctggcggtgaagcagccgtgacggtgcgggtgatcactgggtgtcaccaatgccagcccaggatgagcatgtgtttgtccagcgctgatctgcacatcaagccatcaattccttcctgcgctaccgtttcaactttttgacagtccgggggaggtacggagcaaggaaaggcggcagattatcagatcatttcatcttgtttggctgcctccggaagaaaatgaccagtcgaataggatggcgagtcagggcatagtattggcatattcccagacaatgtgcgtgtcgccggacattgcaaaaaaatagtatatgtgcgttttcatcagaagtcgatgttgcacccaattgtcagtacctacgccgccagccatcacgccatcatagtccatcttgatatcgcgggttctcccactagcgccatcgaccggcctacactacagacatgttggccgctggcgctgttgctggtggcccgcgacgtttcttttccagaaggtgtcgtctggccgcacgacgacgtcggtaatgccccaaacagctggtcgactgcgtggtgccgggtgattcggcttgctagaaagagctctgccgggaaggcggggggcgggcgggctgggctggcaaggtggtatcacaaagagggcagaggaaacgatgtcattgggatgggttagatctggtccctgaccagcggcagggactttatcgcttgaagcgagaaggaaaatggcgcccaaggctaagatttttggccccgtgacacgattcgggcgacccgctattatgccgagcacgaattgagggcattcaactggttcagcgcaatccaggtacccaatcaagctgcggggacagcacggcgggaatggatcttggactggttcttttctttgacggacgagagcgtggccgtccgagagatgatcaaaacgttgatcgtcagcctgggcatgtttgagatggctgttaggtgtcgttgctgccatatcccgaaataatgccatgttgtgtgtttgctgccaattcgtctgccgccgccagtgggttgggggtctctatccgcgctgggaaagcgatttactagaacaaaggcgcctgtcagcacccatgcattcgtattgctattatcggcgcgactctgtcgcgggcatgcttggcatcagagcagcaatggagttcttgggcacctcctctccggggaggtcggtgaggtgcttcgtaaaatgagatcgaaaccgaggctctgcgcccgctcgcatggcccagggcagtgatcctgcagcgaccccctagtgtagcgcctcgatattttgtgcatattgtacaccgtatgggtgcatatgccatcaaggtgtgcatgtaggtgaggtgtaagattcagggcgaaggccgggcaacgccctggtatgaagatcacccacagcgtgcctcagatcgcaacagcgagcaaaatcatacctggctgcagctacgctacggaggggttaggaacggagtcagtagaagcgccaagaaatagcctcttgggttgtagacggagaggcctctccatgcggcacaggctacagcgcattcgcttttgagaagggttggttgttggaagttggatcgatcgaaggctgccgacttgccggactcggtgcaccatgctcccagctgaactagcggtggctcccccaacactggatgagtgaaatctcgggcgatttgccatgtgctcgtcagtgccggcggtcaacagttgtcgggtcgagggttgcttcctgctctcagcatcagcaacaggctcagaggtgctcgagggcctgaggagggatagggcataagcagggcttcaggtggtaccggtgagggcgatccctctgaccgcatcccgtttcccatccaagtggcctcggtcgatggttacctttgctgctctcggcggacggctatccggctccggagagaggcagagaagcagagaggcagagaggctaggaggacaacgtgtgctctgtggctgcaagtggctcgccgccgtcgttgcgggacaggcttcagccaaaaaggccaatgaggttggaatgaggggcagtccaaggctccaagctggagccatgtggacgatatcgttgggtggggctgggcacgacaggggcagcttcaagggctgcagctgtttggcaaccacccaaccgctcggatccgcttttctgtccctgtccgccgggagcatcagcgttttgtacctgtacctgtgccggtgccgtacctgaattgatatgtgtgattccataccatagagtcgtagaatcaagcgttgaaaacgagaaacgaccgctgcgaaaaatcaaacggcaacctcatcagatgatccgggcgatgaatgacatctccatcccgtcagggagaggttgcagggcagcacaagtgtgaaccccgccgtccgatctgtgtgttgttgttggatcgtctgcagtgtcttcccatttcagaagggcaacgacggcaaccggcaacggcttcactttcatgtcagactgcgcctgcaacaaaaggtcagcattaatatcatcaccatggcacgaggctccattcgtatgtcaatggatccaaaacgggccatacaaccggaggagccccgccatctgataattatggtgatggcggcagaaagtttattttgtcctcagagtggcgtatgactgacgtttggttggtcggtcctgcttgcaccggggcatccactcgagcaaatccgaaagaggaaggcttgatgcgagggcaccgtgtcagtcgcgttcggtggtttggttcgtagaaagctgcggggttgcgggttgtgggtggtttgcgagccccgttttctttgggggttgattttccaacctgttccatgatctcatcccttccacatccgtccgttctcccagcgaacgccagcgaatcaccgagaaatacggccgtggggacctgaagttgtgctggggagagtcaacgacgacggtgttttcggaggtcggctgttttgtagggcttgaaaacgagacggtgtactttgtaccggtacttgtaccagcttttgctccgcgaaccctagcgctaaagcaatggtgcccatcaaaatttgcaggccagtgagtgaccacagttgcaacctacccccatgcttcagaacaactctacctatctcactggatccaatgtattattctcggtatcttttgcatatttgtcttttcatattatcagcaatccggagtccttttgacttgcaaagagcgtttgtcttcgagcgagttcgttgctctgaatagagctacatctgttaggtaataacaagacacactgtgctgtttccggctcgtggcccaacaacaacccaacaagagcaagtaacaagtatcttacacttattaccgtaggaatccgctgtcatcgcctcccgccaagggcctgttcagacagctgggtttgtagccgtgtttccgtagattgggttccctgctcgaggttcatggtccaaggatgctgttgctggtgcccggtcctggtccctggagcgcttaccgcgaggaaggtacaatgtacttgcagcttggatgacacaattttcactccatcagaagggaacagtcaccgtctatttcccatttccccatacaagtttttgcagctcctgcttttgcttctcctgctttgctcccttgccctgaccgtgccatggcttctgcgccgtcactcgaactaataatttccgggcattgccttctggaacgcagcaacaaaagagccaacgcccacccactccagctcacccacatcccccaccctaccacaggtccacggccttgaaataaagttttggctgcgcgccctcgaactcgacagacggacacaaatcaaactctccaaaacctgaaaccacctttaggttaacctcaacttccagtttgctcaccatacgacatctaaccacgccggtacacgagcacacacccactgccaactgcctaccttatactgcctgtcctgccgcagcagacctcgagccattgttctgctgttacccgcgtcctcgactgatcagccattcccgacgaccaccttggcctgctcctgggctgagagctgcagtacctccaggacaaagtgtcgggcaatttttgtgtggttttttggtctcacctccttttctcgacgctgcacgcgcgccacaagcgaaaccgcatacctcacccagcaatagcgctgctcggctggtctggcgcattcgccaagctacgcacggaattcactcctagtctctcccccaagttcccaactctgcccagcacttacggacccgcaatcccaccaggagacgagcacgggaagtgggcgctgctatagggttgctgaggaggacctgtgtctgctgcagtgcggtcggcattcatctttttggactgctgctgcttgtaataatctgtgtttgaagcaggtcttgtctgtgtggaccaccaaggttccccccccccccctccaaagctgcgactctccaggaaacgtcccaatagagacacttgcatacgactgccacctcgccaacccgggcttcacaacgcaagacaggctctcgcacacacgggccactcccgccccatccaccccccaagaagcactcgacctgggtcatacatgctgtgtgtaggtacctaggtcttgttccccgtacctggtacccacagataccgcaggtacatcacttacagcgaccactcacgactggttcgggtgcgcctcgctgctctttgctgattgcgcgtgggactggatcttccatcgccttgcatcttctcacacccatacaaccactcagtcctgggcccctggccgtccattcccttatacttcaagaacgacacccccctccccggagtcgactggtccgtatatctatatcttccccgcatttctagccattggcatcaacacacatcacaagcaccataccctcgaagaaagatgcgaccaaaggcttcccatttcagatagtcctccaagatctttccttgcctgtaccgtggccctcttcgtctccacgtccacgcctttgggtcggcaaagcggctgctccctttcctagtgcctgtctatttcccggggtcttttctatcctgcaacaatcgtcgaaatcatgtccgtctctaccgattcaccgcgtccattactgccctccacctcttctcccatgactcccgatctcctccagagcaggcgttcttcacgccccagccaggtccggacggacctggtccctccatcacatgcccagctcgtcgttataccaccatcagcagtcagcaactcgtccgcctccaccatgtggccaagctcgcaacatggctcgccaacccagtctatggaggctgttgccagtctcacgacggccagctccctacagggctcaccagactcgctggagccggggcaggaaaaggggcttgagctcgtcacccctttgcagcttccggaggccattgtctcgaagcagcccgaccagactaccaccacattgtctcgaagaaccagcaacacctcactcggcagcaccctgaagagcccccttggaagcacaacggccatggctgaggctagcaagtcgatgagcctgatccgtcgaacctcgagctcgcttcgtaatagggccaatggcctgttccctcgaaggggttcctcaacccatccaaggagccgggatgggagcgttggtcccggtgtcatgcgaaggaggggcagtatgagcaatcccggtaccccctatgacaatatcagtcccttcgagactgattcagatgatgatgtggtactcgtgggcgtcgatgaagtatttggcggtgatggggccatccgagaaccaagccctcttgcttcaacaccattggccgcgagttttggctccgttccgctctccctccgccaagggacaccactgacgaaaatcaccaaaaagaacaaccgaaagcgtatcgttctgactctagaccccgattcggccaaaatctggtgggatcggaccaaggcatccaagtgtgtctatgtcgacgacatcaaggagattcgcatggcgggagacattggacagtacttgctcgatgcgaaactcgaagaaaaggacaggcccaggttcttctccttgatgtatgcggttccagggaagccaggggtaacaaagtggctacacctcatcaccgacacagacaaggccttctacgactggacccagacacttggagccttctcccagtaccggcaagattttgcggccagccttatggctttcaatgacgatgctgttcgtgtttattgggaccgggagatggaaaagcggttcggtgcggtgcgtttcaaggaggccgaacaaatcgaatttgccgatgttgaacgtgtgtgccgaaacctgcacattcatgcgtcgaccgactcactgcggaaaatcttcaacactatcaagggcaagcccctgtcgtactcccagagcagcaaccctggcctcaactttgatgaatttcttgaatttgtacgaatgatgaaggcgcgagaagacatccgccgcgtatatcaagaacacaccgcgagtcaggagagtggtatgaccaagcccgagttcttgcagttcttgcgactagtgcagtgtgagaatgtcgacgaggacttggcaacttgggaggccacattcgctcgctttgcgcgcaggggcaaagcgaaggatgccgagtctcagggtgatgcaggtcttatcatgtcagaggccgcgtttgccagttatctttcatcttcttccaatgccgtcattcccaaagcaccacaaaagtacgacctgaacagaccaatcaacgagtactacatttccagctcccacaacacctacttgctcggtcgtcaagtagcaggcacctctagcgtagagggctacatctctgcactgatgggaggttgccgatgtgtcgaggtcgattgctgggatggtgctgatgatcagcccgtcgtctcgcatggtcatacgatgaccacgcgcatctcctttctcgaggtcatcaagaccatcaacaagtacgcctttgtcaagtctcggtttcctctctggatctccctggaggtgcggtgcagccaagcgacgcaggtcaacatggccaagatcatgatcgagatctttggtgacaagctggtgcaaaagcctctcgagtccttcactgatcgcctcccaaccccgtcagatttactggagcgtatcctcatcaaggtcaagaagccgcaacagcccgaccccgtcgagcgggttggtcgtagacgcggcaacagcatgccttcgcctttccaacgcccactgccagacaacggaccggtcccatccagtcccctcctgagtcccacagcgatggcccgcaccaaccgcatcaacaccattaccgagggcaaggttcacgacacgcccagcagcagccccagcgagtgcgacagcgagagcgaaaaggattcggcaagaaaggtggtcaacagtaagatcagcccggtgctcggcgcgctcggagtttactgtgtcggtatccaattcgacggcttcgacactcaagaggccaagtcgttcaaccacatcttctcgttcaaagagaagacgtttgcggagaagaaccaacctggcccatcgaagcaggcgctctaccgccataatatgcggcacttgatgcgggtttatcctaatggtgggcgcatcacatccagcaacttcgacccactgatctactggaagcgcggagtgcagatggcagcgctcaactggcagacatttgacctcggcatgcagctaaaccaggccatgtttgctggcggaacagaccagtcaggttatgttctgaagccattagaggggcgtcagatccagctcatgcccaacttgaccgctgatgaatgcgtgggcaaacggccgcgcaagagggtttcctttgatattgatgttatttcagcccagcagttgatgaggccgctcaatctcggagagaaacggacgttggatccctacgtcgaggttgaagtcttccttgccgacgacaagagaaacaagaacaatgccgtctccaacgttaccgtcgaagagtcgaagcgcacctaccgctccaagtttgttcgcgacaatggcttcaatcccgagttcaacatgtcgtgctcgttcgacctcaccaccaaatacccggacttgatctttgtgaggttcaaggtcaagcaggccgaatccaagggttacaatgacaaatcccctcctctggcaacctacactgccaagctttccaacctcaagcaaggctaccgcacaatcccactcctgaacaaggaaggcgaacaattcctgttctccactctcttcgtcaagatccgcaagggtcccgtggaggtgttcatggctgattatcaggaagaggtacccaagaacgggaacagactcaagaatattggcaggaacgtcttcaaccaatccaacacgagccccaagtcaagcatggacagcggccgttcctgagagccttgcacaccccctacagcaacaaaaaaaaagctggactttccacttcccccttgtatcaataacagatttgaacgggttttccttctggcacagccatctgagccgctgttttcatcatttttccacacatttctgttttctgttcaggttgaatctattatgaaatacccggtggctcatatcatgtatcatggataaacagtgttggggttggagaggtagctgtcttgacagcattgtgttttatttttcttcaacttcttttttcatgtgtgctcttccccctggaggaggaatggtctaacatgtgagcacttttgggtcaagggagggatcatcaattcacaggagcaggggtttgcacgggactggggggagggaaatatttgcatgtatgttttgtgtataaacaatacccgtttgacacaaacaaaatatttgatgaatgtcctggagacgcatgggttacaaaatgggactgggggttttattcagatttattgtttttctctttttcttttgtttttttcttttgataccaagcatgataccaaagcatattttggaagatagggaaattgggaaagggaaggaggaggcatatgtgacaaacatgattttgaactttggcggcgcaaaaaccttttgaggaacgggggttggtttgggtgggtgggtggctagcttaggtggtgtttgtggttttttttttacattacatagaggaaattcaaagagaagatgaaagccaagagatgaacaaacatatttggacggaggtttttttttttttttttttttttggtgatagtggttgctattttgctttgcgggatttcgtctgggagtgtaaccttgagtgggcttgggttgttataagggtgttgtgtgctacgcagctggaacagaagaggtagcaggggtttttggattcatgattatgaccgaggggaagggatatggcatggtttccataagggcaagggggtgtgtgtaatctctgggaattgtgaaatcattttccttctagctgctagtcagcgcacgaacttcattcattcttttttttttctccctgtttcttacaagttctcatcagcattctcaaaagattcatagggacatacattttgaggaaggtcataattatcagggcatggatgggacaaacaaaccatgaaaagaagggtttacaaacattggggttgaccatttgtgtgtatgtgtgttgtgggagagaggcaaacttgatatttcatgggttcatactacattggggtactacatcacaaggattagggaaggaggctgtttgtttgggggaagtcagctgcatagcataagcatcattatatactcggtgagcggctcacgctgctgctgttactctacgatacctacacccattctaatccgctgtgaacatgcaccccccgacccaacacaccttttattcaatatgctcgtagatgttttctgtgatattgtggtaggaggaaatcctccgggggcgggggggtggggagggcaagccatgatgaaactgagatgccttcaggtaacttggaaatatacctctctaccttacctctgggatccacaaaactcaactactacactcgactctctgccaaaacccatttgtagcatttgccccccagaataatctcagtaggtgcctggcccattgtcgcgagtcaatgacaattggaaggtatgcggtgatgatcaacttccattgtcatcgactctcacacagcccgccgtatcccaccctatctaactagggtacccaacatttgcggtatacaccacgagccaaaccacacaaaaagccatgttcagtcatcaactgtagtactcatatagcagccgcgaaaaataagggagcacgacatcaaagctacaactccctaccaaagtcattgacatcaccactctacattctcactccctgatacctacagccgcgaagaatccggacctgaccccggcacgccggaaaatcacgggtaaagtaacatccctgacagggacaggcagcaaggtgtgatcagctttgaccgggtnnnnnnnnnnnnnnnnnnnnnnnnnnnnnnnnnnnnnnnnnnnnnnnnnnnnnnnnnnnnnnnnnnnnnnnnnnnnnnnnnnnnnnnnnnnnnnnnnnnnnnnnnnnnnnnnnnnnnnnnnnnnnnnnnnnnnnnnnnnnnnnnnnnnnnttacgggtctattattgccgtgattgagctgaaacaattgtactggtgatagacatgttgccatggacaactacaagatggagatattcatcacggcagcactaacataacctggtgggagttactagactcaaagtacatagtaattgagtaaagtctcgctgcattgccttgaggcactacgtacatctaagaatatcatctatgagccttcgctatgcatagctaccgatgatagtagctaatagacctaatgagatcataagcactcctccccgagtctcaagcatgcatcccaagatcaactgtagagccaaacccaatcaacgcaaacgtctttctcagtcaaagccaaacaataaaactcaccggcgagccccctcacagccatcaacccacttaacgagatcaccactgaccctccaaagcatcattcttcttctcagctttctcctcggtcttctcctcgccccaaccatcaacacccttgtcctcctcatcatccttcttgttaccgaaggtcttcttggcctgggcagacacagtatacacagtcatacccgccgaccccatctttgtatccaccataccagccgtaaactggcccataaagcgggcgtagtcttccgacttgcggatcttgcacttgctaccctcggactcagcgtgctgggccagtgctgcgtttgtgtcgaaccatttggaacacactgggcactgcacttggaaaccagtggtcggatgtgttagaatgtggtttcggagaccattgctggtggggaacgccttgctaaacaaagcgtcactacataagcttattaaattgggccgttttgacgagacatacatgcacctgtccctcggacacccgtactttctggtatactggttatagtactgtttggggtcccaattggggttgcgaggatcgtgtctgtcatagaccggtctcttctcaggctctcgccaatcttgagcttgcgcgggggcgcgacgcgcaggagcaacagcgggggtggtggcaggaccagtgtagctcgggaagagcaccttaatgtccccagcctcacttgactgttccggatggtcgctccccggcccagtcagcaaatcgcccttctgacccagcgacatcatctggaaggtgacgggatccggcttgtggctgctgtcaaccagaggacggagagaggagagggtgtcgcccgcggtctcgtcctccgttgtggaaagatactgggtgtaatgggcaggacccttgttactgccactccaagcggtgaaagtggcaaccttgttctcatgttgaccaggcaccatctgaagctggcgggcaaatctcaaggctttctctcgctcctcgtggaatctctcattggagattgtgttgcatcggttcttttcgatgtgatccacgaagccgctcatgcgaacaagggtggctttgcaaccggggcaaaccattttctggtcaatctgatggaactgtatctaggacttagctaagagtaacgcgggcagtcaccagagtccttacctgcttgtagtgcatctcggcagcaccctcggtgcggaacatcatcatacatttctcgctgttgagagaaagaggttagggacaaacggggaaaacaagaagccatagacaaaccagaagtagtgtctgtttcccttcgcatactccgtcttccagtgattgatcatcgtctgcttgtcatcgaacgaagccttgcaggtttggcagataaacttcgactcctctggcttctccatctcgtccatggtgttagatgacaacaccgtgaccgtataggtagaggaggaggcagaggaggaggaggaggatcaggaggatgaggaggaggatgatgatgatgatggagagcataacgaacatgtgtggaagagaaggaagagtataaagaataagtttgttacgcaattccgacctcaaaaaagttgagacgaggaagaggaagaagagttcagttgggatgcaagtttccagcagcaggtaacctaaatttcaaaagacaaagggcaaacagagtttggctgaccgtgcgatgattcgacttcaactggcaggtacatccttttcaccggtaggccgacgttttccattttcagccggtcggcaatagtggacaaatacctatgaggaaagaacgatgatgccagtaaaggctcccgctccttctcaaagaccggaagcatcagatatggcaattgcgggcagacggggctgtaccttatgatgtctgggatcttgagttctacgagatcatggggaagatcggtctgatatcatgtgtatatggaggctactgtacaggttctgttctggcagtatgcgtagaggtctaatgcctaccaggtagatgaggtgagtaaatgtggacagactttcatgattaatgatcgtatctgttgttgtgtttgcccagccacttcaagcaaccgcaaggtaaaacaaccatgacaataacaataagttcggcaaacatacaaatcttcacatttgacatcagagaagatacaaccggtcacctacctaggtatgtttgatccatcaagctgcacactcccaacatctcatcacaagatgctacttccttcatcttcacactcttcgctggcgatatcgccccccatatccagatccaagcctcaaccatcatgcccgaacaatagcatcctcctcctcaaaaccagacattaaacaaggctgtatacctaggcctgtggatgtggctattcgcagtcaagccatgcagcatatttcacccctaacccagcacctgtgcccgatacaaacaaggggtgttgttactttagatcccaaaaccgatcaaagatccacagatcgacggatcacccgccctactccctcctcatctccctgatcttcagaaagccttgcttcaccccccagcattgttgtcgccagacatgaagcaatgcacgatgtgttgttttattcctcaagctcaggtgagctgacagtggcaaaatccacacccacgcccaagatccctcccctcgtgagctcctctatacggcaattgatggactacatcacccccctacagttcaacccccctcccccccccacatattctttgtcacagtaggtagcttcatgtaagattcctcatcgaaaaagaaaaataagcctgaaaacacagtttaaggtgcaagtaaggagaagtaagtaaaacaccagcattcgaaccacgtatctcaactagttatcgccactttggctctcatcaatccctttcccacacctatgcaatataggtacatattcgaccggtctatacgtaacatacattcccaccacaaccaaaacccacaatcctacatacgtcagatcaataccctcctaacgcaagcccattacatacgcaggatccggctcgcctaacccaatccacaaacccccccatgttattcctcatcctgcccctaaaaatgcgccttggcttgatattcccttccagtcacacatctgatcccaggaagtgagtggttgttgtctcaatgcaatgcaccatgcaatgtgcgtacaatcatacctacagtcagccagccagccagccagccagccagcttgcggctggccaaccaatcccagccttttgttccaggaatccttccattgtgcaggaaattgtccaaagacatgtcttcatgttcgttggaataagcccaaggagggaaccaatatcggttcagagatctctttcatgaggtttatgagggaacaatgacgcggctctgctgtcagtttcagcagcctactggagttgcttgcccagaagcagaaagatgtcgggcggtgtagcctcctcgtatttactctcagagctaaaaaagctgatcaaatatcaacatgagagatcaaaacttcggcgagcggatacagtgatattttgaagacatcctgagctccaccacccgggatgtatcacccagtttgtgtcaagtccattgaggcttaagatgaaagtgctgctgctgtggttctctgcgaggtgatatggggctggaatcccgccgagcgctgaccagctaatgtaggaacggctgcccgtaatccagtaatacgaatgctattgacaacatgcatccacgcccggcataagtaaccaaacaaaagccaatgaccaagaaaaggcatatcatgaacattaataccatggatcaaacagaagatcggccgtaaatgaacaccgagatacaagctctagaccgaagcactgatcagaggtttgaggacaaggcgagcttcattgcaacctatcgccggatcaacagacagcctcaaacgctaagtcgatgtggacgataacctctgcgatgaaacgagaagatcacctcgatgcacccacaagccatgggccaagagcatggtttgagccacgagaaccgggtgtggcaatctttccgaagaaccagggagacggatcagcagatcgcatttcgtgcagaaactaaaagagacatccgggagattctgccgccgggcggcacctgacgatgatacacaattaccgcagtgtcgtttgtcggttgagctactgcgaagctgatagggctgcagacaatccgtgacactgggccccgtgaatgagagcaagggtgacatagcgcctggtatgatggcgctgaaatgggcaccctccgacccggaatcatatggactaattcaaatgaaacacaatgtgtgtttctggaggaggcagaataccgaggaaaaactgctcaagggcaagtgtgtggtggttttggcgtgagacgaggcgagaaaaaagtgaggcggacgaggtcaagctctgggcaaccagtagaatggcaccttggagattccgtacatgcaatactgtgccttccacgagcctgtagaaggatgtccctgaatggctagaaccaagaagaacactaggatggaagcggtactgtacttagtgacattcttctcaagcctcctcgaccgtaaccgtgcttcaactgaccacctcagccaaggaccttggttcaacacaggcatataaggacaccagagttcccgttgctttgacaatgacgatgacagggagctcagtaccttttcccaacattatcattatttcccgtcgcccaaaatgtcgtcttcgccgcctgaatcgatgaacagatactggattcccaatctggatatccacaaaaaggtcatcactcaggagcttcagtattacctcggacccgacgcgagcgtgaggccttttactcgagaggtgtgaaaaatgcccttccgtgaggtttgcgacaggctgacgagtgcaaactttcagggtgaagatggcttcttgatcaccacaccaggaccttgcctgtcagatgtgagccgccgattccacaccagagctccgatcgagccccaacgttgacaatgcccccaggagcaaatagacgacatatgcgtcaagtcgaagcagctgtgggagaaacaggcagcagcgcgagcagccggcagttcgagcaaatccctcaagcgacctcttcacgcacctgtatcactcgggaagtcgggcggcaccagtgaatcgtccagtagacggagaaagcccagaagccatcgggatgacagacgatgagagtttgggggatacccactatcgggcacgaggtagcttggttcagatcgtttcggatgcctgatgaggggacagtagcagagggatcaatgtggaacgtggggaagcaagccacgaggggcgaatggtgaagcagagtgactgaagttggcggtttgaggtgcatgtgccatatcgattgttgtgttatggtggttgtagagtatttggtcgaccagcaatattgtgccatctggcaatggaacggcgttttcctatcttcggcggataactgcagtgcatgatgcgcgtcggattctgcaaccgagagagctagcccaaattcgaaagcctccactcgttccaattggaatattgcttgttttcctcgtgcatctgggacccgatgaaagtcgcctgagacaacgtaggcgatatgttgtgacttctgttgtgcggtgttgcggtgcgcaccaagagacgtttatggcagccgtgtggtcgttcacacgtccaatcgcccgggacctccatcgagccaatccgaagcagttaccacaaggcaaccgatttgtgcagatcccatagttcattagagcccatgcatcgtcaagcattagcaaatgatgagcagagcggcgccgtatgcaggtttgaaggcatccacagccgtcattgcggtcattccggccccagttccggacagtaagttcccagtagacctcgtcctacgacatatgctgtagcacagtgtcggcgccgccgtctgatattgttgatcagtgttgtactggcacgaagagggtagcatgtggcggacaatattcggaaatggctgtaatcgtgagctcgggaaatatcaccacaattgcgaacagcgggtgcgcaaaagtcgatgagtgagtcctgagagaggcacttgttaggcgttaactcaactctcctcaccgtccaatgcctgtacagacgcttcgtatttttccaggttgaggggaccagccgaccaaagaagtgttgcttggacctcaaccaccggattcgtgtcgcctagctttttgctgtcggtcgaggtgacatatccgatgacattcacccattcgccaacgcgtgtttgttccgccttgagactctgcagaacgaggttgacatcgaccgaggcgaaagtgagttgtctgtcctcagaccctctgtattgcaaggtcaaaacgccagactcggtggaataggatgttacactggagcaccgtcagcttcattccttgaaatttgaaggtgacaagtttcaagagcactcaccatcccaggaacctcactttatcaccaatatctttttgggacagggaggagagcagacacagttgggagggaagcggaccgaaagacatgttgtgagccaaaaagagtgtgtatagttcattcttgaattagatttgacggcaaaagaatcttctgctttcaacgagaactcataccgcagtattgcactgtcaagaaactcctgccttcacgtcgatgaatgggacgatagcatgagactgcttagtcacccagactgataagatcacatgatacctccgggtaaagtccgggatgggggtggcctttgcatccgcgtgccgcaatcgccagtcacattgttggaatgccttgcatcactggaagcatctcgataggcagccttgttctggccagagacaactcctcactgtgcattcgtcaccctaaccagcgataatcctacgcagcgcttcttcttgtcaagtcctacgttggttcttgcgcgttcacttgctccgtttcagaccctgtctcgagagaaagcgaggtgcctggcgttaggctgtgaccccgccaaacgttgctgaggcgtcatcggcaaacttgatcacctgcaccgaccctcgctcaacaccgaaactcaaacctactcgtccacaaccgcgtttgctattttgcacctccatcgcacagagaatcccatcccagatacttagatttttcgatctctcactcgcgataatcagtcatgtcgggcatctggggctggttcggtggtggtgccgcgcagaagcggaaggatacccccaagaatgtcattctggatctgcggacaaacctggagatgctgcagaaaagggaagcccacattctccgccagatcgaggagcaggagaaggaggccaggaagcatgtaaacactaacaagactggtaagtcctttatctgcgctttgtttgcttatcgcccagctggcagacgctgacggctcgtgtgatagcggccaagaatgccctgcgacgcaagaaggtctatgagggcaacctcgaaaagacaatgaaccacatcgaaaccctcgaaatccagattaatgccatcgagtctgccaacatcaacaaggagacgttcgaagcgatgcagagagccagcgaagccatgaagtcaatacacggcaagctcacgcccgagaaggtcgacgaggccatgtacgtaccgaaagtttggtttctatttttgtgcgatggtactgatggtggatatagggaaaaactccaagagcacaatcagctcaacgaggaaatcgcggctgccatcggctcggtcaacattggccagtccatcgacgacggagaattggatgcggagctggacgagctcatggccaaggatctggaggacaagatgctcgagactggcacagtacacgcagatcgtctgccgagcgtggcgaccggagaacgtaagttgactggtaagcttgaagcatgaatcctgcatcgctaacacccccttgcagtcaagaacaacaagggcaaggcgcccgcggtcgaagacgacgaagaggcggaactcaacagactcaaggccgagatggccatgtaagtctcgggtttggcatgatgacatgctgtataacactatatgacgtgggggatgaatacacgaggcaccgacttcttttctcattgtattcggtatggagggcttccaacagtgagcagttggtgtgacgggtaggggggagaccaaggacgaagacaagtggatttgcttttgatatcatatcatctttacgacggtccctggagtttggtttttcgttgcgatcgatggcactggcgtttttgaggttttacggattttgatgtaggtaatgggagggtcgcataggagacatatcttcacacagcacaaccacagcacgctccatacacatacacacacgtggaatcttcctagggcagatgcactgcataacatacctacataggggagggagaagctgcatgcatgaagctttgttgaaatccttcacttttgggagatcatgtcccacttggcgtttggagacttggagactgggttcccagcctcgcgggttcagcctttccccacgcccaggccaagaagaattcatgatggcatcacctggtctgcttttgtttacagatttccccatcacgagatgctggtaaccgtggggcatttcatcacgggtctaatgcatgagaacagccttaccgatgaggggttgatctcaccgcttttttgttatcgttggattttgatgtcttggctttgggacccaggacccgagagttgattctgcgacggttctggcggatggagaggatattgaagatgaggggttgtggttatgattgccacctttctggggtgtcggaagaggtgtttgatggttatcaggcaagatgaagagatttgagggggaggtaactggaagcgcttggggtagatacgatagatagatagggtgttgagttgagtttattttacatggcgctcttccatcatcttcaagatcattcacagatgccccgcgaagcattggaggttatcgtcctcggcgatcatcacaagctttgtttcttggtctttcgggcgctagagggagaccatgttaccgcggggaggttgggttttttgatattgacatggatgcccttgaggctattgaagctgaacgcggggttgggcggtttgagtcttgaatcggggaccgggaatgatattgcatgattctcgctacatatctgcttggtttgacaatgtttccagccatgaattattccagaatagcaatcaccattcgtaaaccagagatatcagcagagacaggtgtgaatatcgaagcacagaccgagacggccgacgacccttgcatgcggcagccgggccggggtacaaaagatggaccaattccaacgttcctctatcaaatgttagcagggaacatggacaagggtgtccaataactagcatcctacagcgaaccacgaatgtcaacgcctaccagacgaccccctcgccgttgacgttcgccagcatcgttgggcgatttgatatttccctcattgtgtagccctgtgaggtcttcgatccatttcatgagaatatcgaagcaaatcaagtgcgacatttgccatgaaggccatgcgaatcagaacgaaccaaaaatttctttggctgatgcgttggcatctgtggatcccccacacaacaaaaagaagggcgggccagccgcggcaaggaggtagagatggcggttcttccacaggcagataaccacgtagcacgccagtgacaccacacctttccattctttttcaccatcacacacctacggcggccacacgggtagaccctttggcgctttttctggatctgcgaaagaaagttcgaaatacttggggctccccgcggtttggaggggtgaagggttgtcactgggactcccgtctctgccatgctcaccaccccaccagctgccacactttgaggggtgcgtatgtgtggttcagggacaggaacagaagaggtgtcaagccgggaggatcgggatggagtgaataaggggatggtggttgttgaagcccaatatcaccccaataacgctcattgttctttggccatgcctcattttatatgggtggcttcttcatctgatgttcagtcagtcagtcattaccgtgatggcctatgtaatgagctgcggatccccatgagatttggccaatcttgggactgtgctacactggtagcttgcgtgatttgcctccttgtagaagatatcatgatgaagagggaaggttggttcgaggtgatatgctctattccagcgagtagtatccattcgacgtggcgccactgcaggtcggtgggccaatgtctgcggttcaatgcagtcacttgagcgaaaagaccagccgaattgacctcttgcgtggggttgtgatgggtttgaaatgttcttgccaagactcagacgcacccatctttttacgcacctgcccctcactctcgtctgtttgcaccagggtgctcccatcaactggagaattctcgacaaggtcaaggcaagaattttgcatcttttcgcctttcttgccttcctgcttcagaccgaggctttgttttctttctctctcctctcttgttgcccaacacaacaaaaccgaccaaaaaaacagtgatccgatcttcaccgtcgtcttgtttactttttcctctctctctctttcccgtctgcctcacatctctctcatatcacccaccctacctacgagcgagacttcctctctcggtctgatcagagtcgcggccaaccacagcccgtcacacaccaccccccctctgccgactgtgcatattccagcacacgacatacattaaacaacccctccagaaagcaggcccgtccccgacatcgtccagccagactgcacggcacacggccaccacgcagcacgaaagccccacctttttctcactttgggcacccaatctgcagccttccgatataccacgagccagaaccagccgagccgtaaccaggccacaagtccgtctgcatggagaataataagagagcccctcaggtcatgtccgtcgagatttcctccgacaaggcagaggtagatgtcccacaagtatgagtctccctcaagatgtcgagtttagtccagctaggaccacccttcattgggcccaaagcgactatgattatgatcaagttcagtatgccgactttagccaaatacaggaagccaaatatggagatgtgaagtacctccaagtatccgagagtgagatggacgatcaagagattgagggtgagttttctccaacatggtcccaatcctgctacacatgtgacatgtctgctgatacacaccacatcaggcaatggcgatttcacccaccagcataatcccagggactcgatagcctctctcaccaactcagagccatcatcagcccctctctcaaagaacgccaagaagaacaagaagaaggcagcgaagaagaaggcagccaaggaggctgagaaggaagccgagaaggaagccgagccacaacccgaagccgaaactgtgccgacaccagccgcggagccgacgccggagccgacaacggaggccaaggaggaagccgagggggaggcttcggccgccaagaagaagaacaagaagaaaaagaagaagaacaagagcagcgtcgattcgacacctgctacatcttctgactctcttgcccccgctgccgccgagccaacatcagaagcccctgcgactgaagagcaacccaaggttaaggaggtcaaggaacgcagtctcgaggcccttgctgctgagagcaagcagaacgaggagcccaggactgaggagaaggttgaggaaaccagtgcccctgctgctgctgctgagccaacgcctgtcgccgaggtgactgggaccaaggagactgaagctcccgctgctgaggtcgccacacccgaggtcaaggaggaggaaaagcccacagaagatgatgctcccgccgctgaagctgctgctccagtagagaaggtcgaagatgctgcgtcctcaacgcccgcccctgagccagaagctgccgaggaggctgcctccacacctgctgctgaccccacgccagcagaggctgccgctgaggtgaaggaggagccagctgccgagtccaagtctgaggacgtcgcggaggcgcctgctgccgagacagtggtcgaagccgaaaagtccttcgctgaggttgcggccccagatgttactgagggtgctgcccccgttgtcattgatctcaagtctgagcctgaggctgagaagcctcaagaggagaccaaggaggttggggcgttcaaggttgaggagccagctaacgaggctgagaagaccgaggaggaatccgcccctgttgccgacgccaccccagagcctacgcctgttgagcagtcaacacctgctgaggacgtcaagcctgctgagtctgagaagactgccgagccagaggttgagcctactcctgagaccaaggaggaacccgccactcaagctaaggaggagccagttgccgaaccagtccctgaggctaaggaggaggccgctgctgccgagccagttagcgaggccaaggaggagcctgctgtcgctgagtcagttgccgaagcgaaggaggaacctactgtcgccgagcttgtcacagagtccaaggatgaaccagttgccgaggtcgccaaggaagagactgctgttgagaccaaggaggaggccacccctgacgtcaaggaggaggttgcccccgagaccgaggtcaaggctgaggctgctcccgaggtgaaggaggagcccgcttccgaagtcaacgaggaagccgctgcagctgcccctgaagttaaggaggagggtacccccgagatcaagactgaagaggttgaggtcaagactgaggatatccctgaggcgaaggaggaagccgctcctgaggtcaaggaggaggctgccgctgaggttaaggacgagactcccgaggtcaaggaagaggctgtcgaaatcaagactgaggaggctgatgtcaagattgcggacattcccgaggcgaaggaggaggctgctcctgatgctaatgaggaggccactcccaagcctgccgttgaggccacccttgaagtcaaggaggagactgccacagagaccaaggaagaggctgttgtggagcctactgctgaggtcaaggaggagcccgtcgtcggcgcccccgcagaggccaaggacgaagcccctgttgaggctgtgcctgaagccaaggaggatgttgctgctgagaccaaggagcagtccacctctgacgagaaagacgagcctgttgctgaggttgaacaacctaccgctgagaccaaggaagaggccgcccctgaggctaagactgaggctgtcccagaagtcacggatgccgtacccgagaccaaggacgacgctgcccccgaagccaagaaggaagctgttgctgagcccaagaccgaggtggtcgaggagcccaaggatgagcctgctgcagagataactgtggaggacaaggatgtatcttacgctgaagttgccgctgctgagcccgccgccgaggccaaggaggctactcctgagaccaaggaggagactgtccctgagaccgaggaggagccagctgtcgaagccaagcaagagcctgctcccgagaccaaggatgagcccgctgctgaggcaaaggaggacaccaccactgagacagttgctgagtccaaggatgagccagtggctgaggtcaaggagactgcccctgagcctgccgttgaggccaaggaggagccagtacccgagaccaaggaggagtctgttcctgagcctgctgttgaagctaaagaggaggatgccccagagccagcccctaagactaaggagtctgctcctgagcccccggttgctgaaaccaaggaggagcctgccgttgaaaccaaggaggaacctgccgttgaggctaaggatgagccagcggttgagaccaaggaggagtcttatgctgaagtcgccgcggctgctgtcgagaccaaggaggaaaccgccaccgagacaaaggatgagcccgcggtcgaagccacggaggctcaggttgaggagtctgctcctgagcccgttgttgaggccaaggaggagctcaccccagcgccagtagaggaggcgaaggatgtgcctgccgcggagcctacttctgaggtgaaggaagaagctgagccaacttccgtcgaggactccaagcaggaggagcccgaggtcaaggaggagtcctacgctgaggtcgccgccgctcccgctccggaggagacagtcaaggaggagaagcccgcagttgagtaagtttatgcggttgtcgcgttatcagttgcattcaaaggctaacgatatgctgtagggaatctgccgccaaggaagatgcgccagtcactgaggacaagcccgagcccgagactgctgaggagcctgccaagcccgaggaggccaaggagggggtcgctgctgagcctgctgtcgagaagactgctgagcctgctgccgagcctgctgccgagcctgctgaggagactgtcgtcgagtctactcctgagaaggtcaccgaacccgttgaggagaagtctgctgagccggttgctgagaaggctgtcgaaccagttggggagaaggttaccgaagctgccgatgagcctgtcgccgagcctgtcgccgagaaggctgccgagcccgaagctgagaaggctgccgagtctactgacgagaccgtcgccgagctcaaggagcaggttggtgttgccgggactgttgctgctgttgccggaaccgttgctgccgccaccgagactgttgctgaggctgccacttctgtagccgacactgttgctgcgactttttctgagccagctgataaggctgccgaagaagctgacaagtcgactccagttgtggagaagaccgaggaagagtcggccgctgttcaagctgagagtgcttccgttgctgaggctgttccagctgtcgaagaatccgccaaggctgccgagaccgttgaggagaaggccgctcccgtcgaggaggccccggagactacccctgaagcctgcagctgaagtcaagcctgagactgaaaccgaagttgctgcccccgcctctactgaggaggttgacagcaccccagtttctgtcgacagggctattgtcgaggagactcctgctcctgtcgaagaggtcgccaaggtcgagcctactgaagagatcaagcctgcctcaaccgaggacgccaaggttgaagtcgctgagaccaagcctgaggagaccaagatcgaaattgtcgaagaggctcagcctgaagttgccgagaccgccactgaagctgttgaggagaccaaggttcccgcacctgtggaggaggccaaggccgagcccgctgaggagaccaagactcccgagcctgtcgaggaggccaagcctgcgccagtagaagaggtcaaggctgaagctgtcgaagacgtcaagactgaagctgctgaagcgcccaaggctgatccagtcgaggaggtcaacgctgttgagccggtcgagcaagttatcgccccagctgctgagagtgtcgaggcacccaaggaagagtcccagcctgagccagtggtcgagagatcccttgtcgtcgaagctcccgtcgaagctcccaaggatgttgccgctgaacccgtggtcgaggcgcctatcgaagcacccaaggaggtcgttgctgagcccgttgtcgcggcggccagatcccttcccgagactgtcgagaaggttgagcaggaggagagtaaggacaccgttgggccaatccccagcgagaacaaggatgagaaggcttcaggtgaggaacacccaatcccagtattgcttgatacccccggtggcttggcaggagaggagatttcagaatgcatttcggagccaaaggacacggacacggacttgcaacaaccggatacccatgatacccccattacccatgatacccatgatacccaggacgcgagtgcggctatttcttctgtacacaacaatgatacccttgacacacctaatatcgataatacccctggcgagaaggaggtcgtcccggagacgaccgatgagacagaagtcacggtggacgacaaggaggctgtcaagacagtggaagaggacaagtctgatgtcacaccatcggacgaggatcttgcggcggcggagtccaaggaaccggcgtcttccatccaggagcccgaggccaaggacgacaaaccagagactgaggcagcccccgaacctgaaatcgcccacgcggagacggcgccagtcgccgaggccgaaccagttgtggagagcacccagatcgaagagcccaccctgccagaggtgaagacaccatccgctgacgttgaagaagctctggaagaacccccctctaggaccaaggagcccactgaagactcctctcctgtcgtcactgatgatgctagcattactgtggaggaagccactcagcagtctgaggaggagaaggagcagcccatcatcgaacagtctagcaccgaaacccctgccgttcaagaatccgtcgatgtcaccagcaccccagaagttgagaagtcggtggttgaggaagttgctgttccggagaaggaggaggttgctcccgaagtcgagtctgtggagaagactgaggaggttgagccagttgaagtatcagatgccaaggtcgcccagtccgtcgacgatgctcaagccgaaaacgacaagtccgacagcccagttgctgctgttgcggttgctgccggcattgcttctgctgctgctatcgccgctaccgccgcctcaatcgaggagcctgccgctgtcgagaaggctgttgttgatgagcctgaagtatccgagaagactgaggagccgatcaaagttgacgagcctgttgctgttgccgataagtctgttattgccgatgaacctgccaccaccgaggagattgtcattgccgctgccgaagagcctatcgagactgacaagcccactagtgtcagcgaatcacgcagcattgacgagccgcccgtctctgtcgaggaacatgttaatgctgagcacgtcgttcctgctgctgctgttccttcggagatctcagccaggtctgtggagtcagctattgacaccgcttcagtcgtggctgagaacgaggcgcccgtagtcgtcccggcccaggaaccggagcaaatctctgacgctgcttctgaggactttgtcctgattgaagcagaatccatccccaaggaggcaaccgaagaggaagcggttctcatcgaccaatccattgcctcgctcaagcaggtcgccagtgaagtcgaaacagaagcccctgcagcagctgttgaggagaagtccgtcaacgagacggttgtggagcctgccgtcgaagtgactgcccaacaagccgccgaacccgatgttgagtctaccaccaagcctgacgcccctaaggaggtgtctgtgtccggctttgccattcctgtggctgctgccgccggagctgctgctttcggggttgccgccgttgaagcgaccaaggaggaggctccagtcaccgaacgctcgctccccaagtctttggcccaggttgagcgtgatgacgttgtttcggactacgatcctagagataccaatctctcattcggtacacagacaacttacccactacctactgacacatcttttaccttgccgactgacacaacctacacattgccaactgacacatcattctcgctgcctaccgagaagactgcttccgaatctctttccaggggtcttacctcgactgaggagtcgaagaaagaagaaacctctgaaggcaagtcttttgctaaggaactcgcccttggtgcaggcgttgtaggtgctttgggtgctgccaccgccgtggctgcccacacagcttcggataaagagtctagtgatgcggtgaagcgcctggaggcgtatgccgccattttcgatgacgaacccaaggacaaggtctccagccgctctcttccccaagatggcgccaagaacacgacaatcgagtcttctgaggctgtaagcgagacggttccgctcactgaatctttccacatggtggacaagagggacggccaagaggtggcgaggggtggtgtagaggcgaagagtgatggtgaggacattgttgccgcgcggcctgctattattgctgttacttctgctggtcccaaggaaacgataactgacgatgccgttcttaccactcaaaggtcaacaattccaggatcccgaggacccgatgaaacccaaggagaagaagtcattgttgacttccgtgtacccacccctgctcttattcttcctgacctcaatgaccctgtggctcgcgagttaggccggatgcgcagtttgcgccggcagcgcagaaacacgatcaagcaggcggaagagatggtggcagccgccgtcgtcttgtacgccacagccgatattctcagcccgccaggaagtccgacaaccgaaaatccaggagccgatgtccttggtctaaccgaaatgcattctgacgtgaaggggaaaggaaaggaggtgcaagtgtttaccgatggagaaagagggaggcgcagatcgagggacgagcaagaaatttctgctctcgtgactgacctctcagcagacaaagacaggtcgaggactgatgaaggcagacgaagacgccgtagccatcactcgagccgctcttaccgtgatcttgaaagccgtgatcgtgaccttggtgatgctcacgactatcgagatctcagcaaggacggctcgcggcactcttattctcgccgccaccgatccgagagctacaattcgtctcgctctcttggcgctgatgagcgccctcgcactcctcccgcacaagacaaagacagcaactatcctcctgaacaccgaagccctcgcaagcaacgcacacccgaggagcaggctgctcacgacaagcgaaaggaggagcgccgccgtctccgtgaactcgagagggccagggaggagataccagcttctcccacctcgccagccaaagaagagcgcgtcaaggagagatcagcaccccgtcaacgatctgagcgtgatctttccgaacgtgatcgttctgatcgtgaccgcgctgaacgctctgagcaccgccgtcgtcgccatagtcacagccgcgccagcgtggagtttgatgtgccatcttccagcaggaagacggagcccgtcttgaactccagagaaggggtgtccatgccaccttcagcttccaggacatttccacccgaactcaagcgctccagcactggtcgcagctccagggctcgcaggtccgagagatcagagcggtcagagaggtctgatgaccgactggctcgtgacgacgattatcgacccagcagccgagagcaccgcgaacatcgcgagcctagagtacgcaggtccgaggatcggattgttcgtgacgaggaggtcccccggccaagaagcagcaagagatcaacagccaatgtgcttgacactaaagattcggccgcctctgtcggcgaggcttccatcagcaagggtgccgcctcgatcagcagcactggcgagcacgagtcagcgtctcaccgagcaaagaggcaggagaagcgcgagaaggtgcgggagagcgagaccaaagagaagggcggtattcgtggtgctttcaagcgtcttttcacgagaggttaaagtttgcaaatttggtgaacacaagacaaaagacacggaggaggaatgcatgaggcttttatgaggacatgaccgtttttttctcttttttcgtttttcaactcttttttttttcggtctgacgatgggaaatgaagattgatgatgatgggaaatgataaggcggttatggtacttagtttcttttggtgacgatggatggtggaggaggggaatttggtggtggtggggtggatgagacgattatgatggctgctgcttgatctgatgggtagagttggtttggtttctgttgctgtttgcggatgataattagggaggaagagggaagagatttgctctggtttcttgagatgggaattgagaattgtatgttatgactttatgtgtgggatatgaattacatcttgatcttcactcatcatgcctcatgaatctttgcaacagtgatgatcactgtgatttgatatgtggccataaggcggccgccctttgatgctaaggagaaacatataagggatgggcattacaaaatattccactcgtaatgcgttagctcttcgcttgatctgtggccatcatgaagacatgaattgccgggccataagcttgagtgaggtaactaaaatagtattgtattgttcattttcagccgggccctcgccacgtatatttttgatgatccatggtaactcttgatcaagcccccagcacctttcacctttgttgatcatgtaaaagatcattccgtttcttatcatgagagtttttcactcccccttcttttcgtcctccgccccagcagcaggaatcaaccccctcaaactcaaatcataaaccacatcctcgacctttttcacggcatacttgatgctgtcaaccctcttcctcaggatgtcattcttcagattcaagacctggaacccggcgtgcaggtccctgatgaaggcggagatctccaccgcgagggcggtgtcgccgagcgtgacggaattcatcgccaggcgggagaggtcgtcgattatggagacgagggcgaggaggtactcctcggtggtgatgtggaatgcatcgtcttgggcggtgaggttcaaagggacggagtagtatgtggccagctggaggggggtgaggagggtgtgggtggatagccaggtgaagaggaggcaggtggagagggagtcttggagggggcgggtccatttgtggttgtatctggggagatgatggtaaacattggggagcggggatggggggaaggggggaggaggggacgtacttgtagtaaggatattgagatgcaaacgctgagagcttgcctacggtggcgacttgggatttgatgccctcttctacttgggggaggagggttgcgtctttcaggtaacattatcagcctatacgctcaaaacaccggcagtggggggggacatacactttgaccgcggggttgagtgaatcttggataacaaaccctgcgtgaaggagacatgctggtgaagttcgtcgacaatctgctcgagctccttgcggacggtggtgtcctcttcgatcttggacttgatttggtcgaagagggaggggtcgatcatggggggcattttgacgttgggtgagattgagagtggtggtggttgtgagtgaggttgaggttgggtgtcaaaggttgccaaacacacacacactgttcaatttttgagatgtccacaccacagttgctgcacggtcggattatcgggcaattggttagcaagagaaggatttttaatgatgccaaactgctgtcaggccttggttatttcagattcgagatgggaagacacgagaggatctatgcagggaaaatttaacccatggaatgggagtcgcagtttagtcacggatatcatcaacagcaggcaataactcgacggaagcatcaaaaattggtcgacaaacagcgactcagacagcaattcaccatcaattcaaccaacacacaagacaggaaattcttcctcgcatcccaggaaataatcccaagaatgcaatgaaaaagatggttgggttcgcgtcgcctggaggcagtgtaataccagggacactatggccgacgatcatgggcaagcccagaggaaagtcagccgagagacaaaaattaggataatcacgattctactccgtagagtagtttcagagattaaactgaaaagaacagatactacacttgatctaagccaaaaggcaaagagagctaaagaagaaaaaaaagaaaccaagtaaatttgggaggggagcgctgaatatatactcgatctggatggtctgtgcacgcctgcaaattcttcggcgggtgcaaaatgtctgtgcgcttcagtctgccccacctactggtcaatttggtcagtgcgtccgtcctcagtcctcacgtgcgagcgtgttggagagagagcttggcaggcgtagtctcagggttcgggtttggctggagctgtttgcgattcgaccttcctgttcagggatctggtatctgtatcatcctgcgcgcaaatgttgtcccctttctctcgtcctcaagctgtaacaaacacacgtcaatgcctttggtagaccctataaccatggcttcggcagtcagcaagaagggcgctgcgtcccaaaccgtcacggtcgaatcgagtgcttcacctacagccgagacgtataacctcctcccggtgtccatcaaccagacgccgctcgcccagaccctccgccatgctcaacctctgttgttgtcgggagtcctcgcctttgggttctcctcgctggtcaaggacccagtagcggccatgtcctcgaccacgttgccattgacggccgcgctgcaggctgtctatgccgttatctgccttcctgtcgctgggcgcggagggaatgatacggcgaagaaggccaaaccaagaccgggggagaagacgagcaagaagagggcgaaggaggggggaaacaatgcctatgtggtatgttgttatgcttgccgtttcgttgcgaggaatcaagtactaactactagtcgtgacacagctcgccgccctctcgctcctcatcactgctctcgttactccgttcatctacgcctccatggttcttttcggtgcgcctttcctcacccacgggtctcatacgcttctctgcgccgcccacttgtctctgctgggactcttcccgctcttctacgttcatggtgtcgatgctagtgcttgggctgctgttggtggtttccgcgcgccgttggacgaaacgtttggaggtcttgcgggtgcgcttgttggtgcttggctgggcgctgtccccattcctctggactgggacagagattggcagagatggccagtaactatcctggtcggcatctatggtggatatgtgctgggcaaggtcattggtggtacagcggcttggggaaagaagttctgagtttagagtcttggatcaggtacctggaaacatgaggagaagggggaaaggactgtttggaatgaagctgtgtgtgataccctgttggagttgcgagccggaattggtgttgaacagtgtacatcacgggtgcggtctatgaaggcgaccgttgtaaatactaattaatggtaactaaatacctaccaaaatacctccaacgttaacggatcgtgatatttcaactcaaacatcgagcgtcaatcacaagtgtcgaagatccgccaagaccagtcatcctgcttgcccgccggcgcatcactcgaagctcgtcccctgtccccgatgccgcaaggtggggtgtcgagtgtgccgacatcttcctgcgccgaagtccacacctcgagatgactccaacaccacggcaccacactcctttatgacccttccgtgggcgtcctcgagtctttggtccctcccctcgagcactctacctcttcttccttcaattgacacttcaaaatgaccaaactacccaccccggtgctcccagcaccccctccgaacccggagttaccactccaacccgtcccgtcaacatcaccaccaccaccacaacaacaacaagcctcagcaaaacactacaaaggcttcgtcgcgggtgtcttttccgggatcgccaagctagccggtacctctcccccttccctaacatgacctcccccgcgcttgtactaaccctccctctcagtcggccaccccttcgacacaatcaaagtccgcctccaaacctcttcttccacccgcttctccggtcccctggcatgcctcacctccaccatccgcaacgaaggcatcttcggcctctacaaaggcgccacaccccctttagtaggatggatgttcatggactccatcatgctcggctccctaaccttctaccgtcgcctcatctccaccaatttcttcgcctcctaccaccccccaaacgacccttttctccccccctcagtaatccccctgcccacctatgcccacggcctagcgggtatcctctccggctgcaccgtctccttcgtcgccgcccccgtagagcacatcaaagcccgtctccaaacacaatactcctcctccaagtctgaccgcttatacaccgggccaatcgacgccctacgaaaaatctacaaataccacggtataagggggatataccacggtctgggggctactctcatcttccgagggtgcttcttcttttggtgggggagttatgacgtttttagccggtggatgaggaataacacttcttggtctgcgccggtgatcaatttctgggcgggggggttgtcggcgcaggtcttttgggtcatgagttacccgagtgatgtggtgaagcagaggatcatgacggacccgttgggaggcgggttgagggatggggagaggaggtttaggaggtggagggaggctgcaagggcggtttacaaagagaatgggcccaaggggtattggagggggtttttgccttgtttcttgagggctttccctgctaatgcgatggcgttggtggcgtttgagggggttatgagggcgctgccggagtagttgcagatggagacgcctatgggagggagaatagagggtgagaaacaagagatatattaggggtgtggtgttgcatgacgggaagaaacggagataaattcatagaattgatgtttgcatagattatacccaaagagttggagggcaaaagggaagggttggacgatatatatatacccaagggaatggatatggacgcatatgagacttaagagcaatagagacaacatatacacatcacaagcaaacaacagaacttcaagtcttgtttttggccagaacgcctggccgcgcaacggcggcgttgtcacttttcattgaccccgtttctcccaaccgctatgcacaaccaatgatcccatttttgttctggtatctcttgtcttgccagattatactcctttcggatatatcctccctcgctcaacagatagaccaccaatttactcgtcatcctcctcctcagcgtcgttgacgacgttgaagaacttgagctcgtacactcccttagaggtggagacgacgcggagccagtcacgaagctgcatcttcttaaggaacttcttggtcctgtttggtgcgcaccgtcagcacacatgtcctcattttcttttcttttttggcttttatcgcaaaaaaaacaaaaaaaaacttaaaaacttacaagtacttgaggtaacggccagaaagctcattgtgggcaatgatctcaatcttgccatcgccaatctgggagatcttgatggtctcgccgaggttgccaacacggccctcgaccttgatcctctcgttcaagaacttctcaaaagcggaaacgtcgaagatcttgtccgaggcgggctgggaagcgttgatgacgaacttcttggtgaccttggggcccttgcccttggtggacttcttctgtgatatcccaaaaaagaaagacttagcctactgcttcacgccatcatctcccatctttttgcaatgatggtggactgggccaacagcaaagcgatggtcatttcaggtggggatggtgatgatgaggttggtcatgagtatacgtacagcgatgggagccattgcgactgttgaggagaggttcaagagattgaccggtggaagttggatggggtgaggagaacgcaaagaggttgatatcctgcgccttggttgtggtggttaaaagtctggggggaggggtggacgttgcgatttgcgggcggtggagagaggaaaatcgagcaagggaatttttgaacaaattgtggcctgcagcaaaaatttagggctccgcattagcagggcggggtagcttcctgtggcttgtgctgggcccgtgccaagcttcggccggagcgccgttgctgccccacttgacaccgaacattgagcttttggcggcagcaagttcggggttgcctcatcaagattcagaagattgccactttcttgacgaaaagcttcacttctgcagtgcttttgaacccaaaatcaacaaaaagaaaccgaaccaaccagtttaaacagcaaaaggaaattcttcgacgtgggcctgattcgaacagacgctcccgaaggaacaagatttctagtcttgcgcattagaccactctgccaccacgcctatgatttgatgtaatttcacggcggaggtagcattcatataagacgacgttctgttccggcgggcgaacaaagtgtcaagagtcttatcaaatctgttgaacgacaacgccagcaacctagaactcggcaagtcgatgtagtatccctacacaatgtcagatatcagctattagcatagagcagcaaaagtcaaacaaaacgctcgcaaatggtatcaagcatctcaaattcaacccctttcagaccatcgcggtcaacaacctccgctctatcagaacaccccaaaactggatacaacgcagaacacaaaatcaactcacatcccttcatcctatgttcagaggaaaaccaaacagaccaaagtgccaacacaggcaaattccaaaagaaacaaataaccaaacaaaaccacgcaaacaaacaaacaaattccaaatggatatcatatcatccaaaatttccaatccaaataccccaaaacgatctctttcctatcgtcccatatcccaaatattcactcaaattcccaaatagctttttagcttttctttcccttcatttcaatgcccagaattcaatatccaaaaacatttaggcacatcgccatgcatcaaaagaaaaagaaaaaagcccacacattaaacaaaagccccttcaaagatagatgtcccctccccttccgttaacccaatcgctccaagcccgcccatatgcctcctccaagtccctcacccatctcctggtatcaaacagcgcgcacccccacttgctctcccaaagcaacctcctcatctccgccagtcttccctctcccctcccgtagacttccccatcctgtcccctgaccagctggtagcccatcctattcaccaaccccactgcaaactcttcgtattgcttctcatcctccgcaatgagttccttcgctgctctctccccttcctcgctctttggaagcgcacccttgaggatggaagccgccatacgggagcacatcttgtattcgtatcgtgggagggtgagcaatggcgtgctagaccaaaggatgtccgccgcggtggtgtgggcgttgcactcgggcgtgtcgagaaagagatcgcaaactcgggcgcgagaaatatgctgttgctttggtgccacgtctgtgaagtgaatgcgagaggcgacggcttccccagcccagtctttagctgtgcggcggaggtgggtttcgcccagctcggggaatcgtagcagccagaggtgggctttggggcaggaagccaggatgcggagccatgtacggaaggttgttgggtcgatctaaatcttgttagggagagtatgatatgaaaaagggaggtgagcataccttgtacaactggttgaagttacccaggatgatagcatcgtcgggtaacttggggaacaactccttccgcatcctccaccttctcttctggtcatcctcccaggacatatgcctctcattgtggccatctgctgattgcgcgtgatcgcaacagaaaaacgtgtcccgagcaaagatgatgttctccgagtaaatccagtcctcgctttccgtgtaggcctcatcccggaagacatctcccaggtttaaattgttgcggtgtggtcgaagtgtcgagggagggatggccgtcgtatcagctaggaggtaatcgcaccactcggctcccaacgtcccagcaaagcccatgaacgacatctggatcggcgcaggccgcgcggcaaagatctcattgcgcgctccgcgggtgtacccattgagattgaccagaatatgaatgccatcagccacaatctgctcgaccagtctgtctgatggccacgtgctgacatcacggaagacgggcgcttcacgctcaatctgctggcgatggatcgacttgtcactggctgtggttgcatagcaatacgccttgaccttgttgggattgtgaaagccaaagacagattgcatcaaatgtgccagggggtggttgttgaaatcagacgagacatagccaaccttgaaataaggggctggtggctccggtggttcatatacagtagctgggacccaaggtgagcgaagcgtcgaacacgatattcttagcgcattcctctgcgaaatcatccggatgtccttggctgtcaacgggcaagtaaaggtgtggaacggcaacaccgtcggcgcagatggaatcgaaaggctggcaggaggccgcggccgcctgtatccagctgatgacttgatgcccttgacatgtttgtcgacataccagcaccgcatcgcagctctcgtcgaccgctcaatcaacctcaggattcttgagccctcccacgatcgaccagcccattttcgaagttcggtttcaacatccagacctcggtcggtgatcccagctccggcatcccttaactgcgccaccagctgcacaatcgtctgatcttgcaaggcgccaacaccccaagtgctggactccttcagctgccgcccgacaatgtcaaccacacgtttcatcagcccactgccttggccttgtgacttcacatcctgaagcatcccttgctcgtcaacatgccagcggtcaaacttgccacctgccagcagaacaccaccacgacccttccagtcgcaaaccgagttgagcgcagtggacagcccgcaaacagcctcagcaaaatcgggattcgccgatacagctcgcttgtaatacccgatggcatcactgattctgcctctatccttgacagcattggccaagttggtcaatgcaatatcgaagcttccatcgcactgcacagcctgctcatacatctgaatagcaagatccagctgtccgatatctttgagcaagctgcccagattggtatgcaggtgcacatgctttggatccagggtaaggccataataatagtaagccagggcgagcgataagccgctgcctggtacgatcccagggatagcgggaagattccccaagtccataggcggcccagagtgaacttgggtagacgtctgctgaacactagcgagcaagatgccgacgttgtttgctgttgacggactttcctgcaatgacaaggacaggtaatagagcgccagaatatcgcccactccagcaggctgtctgaccataccggtgtttggcccaccattcgacatggtgtcctggaagatcttggctagcgacaacaatgaattgctcgttgtggcaaccacggatttcttgtgagtaccttcgggaacatattgtagtcccggcaagagtcctccgtgcgaagtaaatacccgctgtgcggtaagcttggccctgtctggcgacagaagcaacggcgcggacaggttcgcctgaacagcacccctaagctgccctgaatgcatatccctcggtgctaggacggtttggatccttctgataagcgatcgcacccctcgaacctgtcttccagcgctgatgagcaccgcctcctcaaaagcatccgaggcttgttcgatatttttcaacgagtacagcatgtttcctttggcgtgtatcagcaggatcatccgcccattctcggtcccagctatcgcatatccgcttgacccaaaacctggaacgtggctattgtctgcagttcgggcaaaatgctgggtcgggctgtcgttgttgaggtcgtctagcacaaagttgtcggggctcaattctcgcatcgtggcagtcgacgccgtgtcggcctcgctcgccgtctcgttaacttcatgtacggttccgtttgttccagacatcctcaacgatttctgaatgtactcgataatgttgactgcctcctgactcctatgattcgagcacagcaagccaaccaaatgttccactgcttccaggtaacttggccttagcttgatcgctttagaccattcccgttcagcctcatcctgtctgttcatgcagtacaatgtcgcagcaatatttgaaatagcctcgacgtggctgtcctgtttgttagcatcaccccgtaaaactaacgcggtcgaccagaccgggaatacgcacctagcatccatgctcacgatgcgcttgaaccactccagagcatcttcataatgctcaaggccatagtggagacatcctcccaacagcataccatccacccatttccatccactttgctcacataggttggtgagcatctcgagtgaatttttcgcattgtgaagtggtgatccggtctcaaagtatggccgttgttgaagccccgttgaatatagattcctcgcttggttgaagcctccaacattcattccttgcactcccattgccatactcctagctgccgcctgcttctgtgccatgtgctgtgcatagctgactgttggttcggagagggctggcgaaggtcgtactttggttccgctcgccaacggtgctattgagggtttcgggtataccaccatcttcgatgacgttcttgataaagatccggtccggctgtggtgtgctttcttcgcattgcctagataaagtagcagatcattgtatgttttatgtgcttgctgcagggccagctctttgaaccttgctctcgaggcaacatctccgccactgcccccttgggcaatatgtccagctagttgtgccagagactcatgaccctgatgagcagccccatggtgcgccatgtgtgcctgagcatgacgagcgtacccatcatcaagagggtagcttgacaatggcaagcggaatgggtgtggttggcccagtcctggtgcgtttggcatgccatgtatggtcgactgcgagggcataaacgcactatcaacgacagcattttgtggtgtgtagccattggctaggggtattggtgttcgataatcccctagtccaccattcctccacaccatcgactgctgtggttgctgtggttgttggtagccacccgggctgtagactgtttgactcaacggctggtggtatcctggccctaacaatggctgcaagctggacacagagttgtagctttgttggggtattggttgcagaaagtttgtctgctctggcgcggccggattcgttatcatattcgtacttcccataccccatcctccaggcgtcacaggtgggctacttaatggttccatcccaccatcgagcctcccagtcggattcggtgcctgatatggccatgatgatccagagagtgttgacctatggtagctaaccccagttagccctgatgttctccgagacacagcagtcggaaatattcttgacgaggcaggtaagatcatgtgcttcaatggtgggggtccggaggccaggtgggcaaccgaaccatcgtacccattgtcgatggtgccgcttggtgtcttgcgtctaagtgagtgttccgaactgtggtcgtgggcatgtgatcggatgaacgaggtggtgatgcggtgcaacgccggggctggctgggcgctgcggatggcgaacgcccggggcgttgagtctgtgttgtggagcgagggggagggtcgcgcgaactgtggtctttggtgatgcgacacgtactccaggtcatgttttacgtgcggttgatggggcccgagtaagtcgagctgtggttgcaccatcgggtgcatttggacaagaggtaacatggtggaatccgatactacgtatgctggtgatgtcttctgctgaaagacgatgagattgtatcgcagagaagtgtagataatagagtaagtaaggagcgtcgagattcggtttgcgggtcgcctgttgctggggggggggaggggaatcaggccagactcgttactgcccagtgaatacctcaaagcattgttgactttgttgaagacgttgtcgagcacacaatggcccccgggaaagggtattccatctgaggagtggacagcaaggtcgaaacaagagcaatgctgggatctcgcccagactcttaaccatgcacctgcgtcccctctcagtcaatcaacccaccgatccccccagttccgcccggctgcggtccgggatctgcagaggaaaataatcacaaaattctgtcttgtttcgtccgacgggcggtcgcatccactctctccagcgcccacaacagcgtcaaccacagctcccgtctccgcaccgccgggctcgtgaatagcgacggccgtgtcctcagccggagtcgatcaggtcggggcggggtttgatgtggaggcagtggtcggtggtggaatagaagaggagaacggagggcccgggaggtgcgtgcgtgggtgcgtgatgaaagtgcccttgtcaggtacctggctgtcagtcgaaggtggatatggatcaggatcagtatcggattatcgggacccggcacggcggtgatcaacggcgacggtggcgatgaattgggggggttctggtctaacagggcagcaggatcgtcccctctcttctcctgcactgcttctattcaaaataataaaagagacgggaactggcctgacgttgaaatgcagacggacagggaagtcggcgggaatctcacttgtctaaaatgtggaatggggccgcatttactcaggctggtgcacgacgggggcctgcgcctgcgggcgttctcgggcctaaactctgcagggaagcctccccccacacaagcagcagtagcatggaaacgctagagccctgctgctacactgcaccagcgctgcaccaccctcaacctccaacaaggtaccgtcacctcaccacggcgctgctgcaccctattagtggctgcgggccgagcacatccaagctctgtgaagcacttcagagaccactgggcacgctatgtgaccctccgggacatgagggacatggatcgcgtccctgggtgtggttcgcttcattacgacggttcgactaaggcatgtataaacctgattcatcccggtccatcatggccgtcgacatctgataggcacctcagtaaatgccatgccacgccagctgtgcgactcgacgaggcagatacctctcaatcactgacagactgacaaaagagaccagagagaccagagagaccagagagacgagagacaagagagaccagagagacaagagagaccagagagacaagagagaccagagagacaagagagaccagagagacacacagtattatgcgccgggcgatgtgccgtcacccgccgcccgaagaatcagaatagcacagcaacacaaggaaaacctctgacctgagggacatgtgcgggacctgtggacacaagcagcaagggtcagggcagggcaaaggcagggtcggttgtctatcccatggatgcgagtcgcagcatgcagactccaatcatctcatctggagcctacttctgggcgtctcccacatcaggctgggtgagtgggtgtgttggacagcccgtcttcgtatcaatcttgcatttttctggaaaacatccctatcccgtgcccctcattcttccctcggcaaactcggcccagtcttcctttcccctcccagctctacgacgcagaatatgacagctctcctcgcttcatcatgagttttggggtgcagttgcaagcagcattgcgtggcatggctgtgtcaatattagggtgggtgtgtgtgagcaccacaggcagatccaaacccatcccaccattcaccccgcagatggcccttttcaaacgacgactggtggaaagcctcatgcaaggttaaacttctcaagacccgcggcagacattatcacatctacggtctgtcactgttttcagcgtctatttgtttcttacaaaatagacttccccttggggtctgatcggggtcccaatggtcaccaaactggcccgccccctcatgccatgctcgatcctatacacatacttcacgccgtcagcctacctcacctaccggcctactatccagcttaggttacatccacccaaccctctccattcccattgctcactcgcagaagctcagaggatagccctatatgtaaggttccgtatcacccaccacacatgctcgcattatactgtgataacaagtgacagccaagacaccaacccatcaacgagtgagatcagtcagaacagaaaatccccagaaaccagtcggtgagaacccaatccaaccaccccaaggtcccaaccatcttactcaccacaccatcccccgtctttcttcatcccccggactccgtacattactacctaacccaatcatgcaacctactttggtgtacattgtctgagattgagggtcactctttctcatagctgaggaaccaaacatcaggtaattctgaacccgccctcactgaaccaaagatggtcacctgcaaaagctctgcatacctactgccacccggcgcatattccggcggcacttgcggcacttgagtgtctctcgtttctgcagaagggaaatctgggagtttcaacctcacctaactactctctcacactcaacctcaaaaagataccccaatattctaaacatacccaacaaccccacggtaacaccaaacgcccatcattcactcactgatctgtgacccttgaaacatatcccctcctgccgtgagccgttgtcactcaccccgtcccaccctccttcctctctgtgaagcacaacagtgacagtgacttgcataaaaaatacttagcataatgtaccttacctgccaaggcatgaaagaatagcaaacaaccaccgcaattcctcgaatccaaagccatgaatcaacggatccggcccgaaagaaagaaaccggaaccccccatgaacaaacggttgatcaacacccagctgcgccatcctatcttacttacatagttacccgtgtcctcgcctcgtcatgcgcctcttctgtgccattcggtatggaccaatgccatgccataatcccatctcaacaccacgaacatacttgaatcatcgataaaccacccccattgttagaaacatcattgcaactatcctgcacgtcttcttcaagactttgaattgtcatgtatgtaaactgaggcagccaagtacaacctcagccctacgactgaactggccacgtaattttgtctcccaacgatgagacctgctgtgcctcaaacccttcggtatccttcactcttggccttcatcctttcatcaaaatccgaaccgaaccgctcgcacccagacatttgaacctcccgcaccggaacctcatcccctttagataggttcccaagttccaaatgctcaaaagaaactcgctagacccgtgaaacaataagatgcttatatcacggcacagaagaaccatgagccttgacggtgaacctggcgccgaaaaaaatacaacattttgaagatgatcaagagaaaagagacacacattcattacccaatcttcaaatccctagctggcatttccaagccaaaattcctcttaacccccttcttaaacccccctggacggtcagaacaagcgtcaagaagacattcagatcaagcttattcacactcatctcgaacccatagtcaaaactcataccaacaccttgccaaatcccacgagaacatcgtttcgacaactaaaataaaaaagttaacgattttctacacgaaagagcaacaccatcccacccgtatcataggacaaaaagagaactaggaaccgcgtcgtataaaaccaaggccttagaagagagaaatagatgaacagaaacaccctcgacttctccttttcatgacacctcgatgcaagtttaaaccttgcattcgccatctttgaaaaagccatgttgatcatttcatatcccgtcctccactctgcaccctccactccccccaagcccatacataaaagtcactcgtgccgaaacacgccagtggaatccttaactttatccaaagtaagccatcatcaagtcatcaaatccacctacatatcagagcacttcttctcattagagcaccaccaccaccaccaccaacaaacaagcccccagctatcgtcaacatacaaaccagtggtttttccccaactggaaatgaaaccatgataaatggcctaacacgaacattctgaagctggtggcgccctcacctcgtatcacccggaaacaaaactccacgaacctgcaacacaccacaccaggcatgctctcaatgccagtgacatcatctcgtatctactacttacagccctggacatcaatcacactcatcagaaaacaacagcaaagaaaggacctcgacttccacagcgcctacacacgcccctccaacaagccatagtgagtaatcagacgggacgcaaatatcaatcttccggaacaagataatgaaacccaaaagtcctaccgaaagcaaggtcaaagtttggggcgaacgtcagggtctggtttcttcttcatcatcttggtgtgttatttggtataggtatgggtatctcggggcgaactgtttcatcagggagcggcaaaaaaggaacgcgggataggcgcggttcacccattaaagggctcaactcctttggaaaaaaggtcctctgtgtgtgtgtcgtaatttcccccgtcccaaaaagtagcaaagcaattcgcacctatccccggaaagccaaaacatatgtactggcaagaccatgctcggccacgaatcatcttcttttgatttgatttgccgtagtctggcaagcctgatgtaaagcaagccctgaactcctaatcacatgccaagagaatcccaatccgaccataatttttatcgtaaacgacgcgcttattcctcaggaactaaaaaaaaaaaccaactgttagcaatgatcccctctctctacccgtaatcgaccgtccagatctccccccaaatgtcgtagaatgaatggccacacatactgtcaatctcgccgttggcgatagcgtcgctgatggccttggggctcttgccgtcaacctggcagccaacgctgaaagcagtgccgaggatctccttaacgcagccctcgagggacttggagaaggacttgaacttcatcgtcctcgcaatctcgataacctcatcgagggtgatggacttgttgtgcttgatgttcttctccttcttgcggtcacgggggggctccttgagggcgcggatgatgagggaagaggcggtagggacgacggaaacggcggcttgacggttctggatggtgagcttgacggtcacccggagacccttctgtattcgcagcaaaaaaattatgtttcgtcagaaatcgtgttctctctctctctctctttcggttcttcggttctcggaggggtggtgtggtttttcatacccagtcgccagtagccttcgcgatatcttcaccgaccttcttgggcgaaagaccaagaggaccgatcttgggggcaagagccgaagaggcaccgacctcaccaccggtggcacggagggtgctgcaaaaccatatccgtcagtttcctgtcgttcgttttccaattccttgtcggcgcgggggagagacgaggtgcggttttcggctgggaataattcttacatcaccttgatctcgttggggtcgaccttgggagctgcacatggcccaaagtcagtattctggcattaattcatttggtcgattcgttggggttgacatacgcatggtgtcggctggttatctgacgacggacttgggtgtgttcgtggtgagtgcggccgggccaagtatcaagacgacgaaatcaaaaatcgcagttgtgggttttgccgacctgccctaagaaaattgattgtgtggctgattgaggtttggcggggcctgcaaggttgtagccacagtttcgtggaggggaagctccctccagccacacggacccacctcttggcgatatgcaagttggttgcttcccccctgagtgagcctctctggagataacgaaccgagctcgattcaatggaccaaagcgcatgcaaaggaatgggaaatatctgcttttgatactgagaaatatttcaattatcgagatcacatactgtgcaacgcttccacccctgcctcaactaacatcaaaggcacatcacatgtttccaaaaactccgttttctctggtatagattccgtaacactacgctaaacaaatcacaaaaccatctttctagtaatgagtaaatcccgggatcgggctgaattaccctctcacactctaacaaccacactagtttgtcccgctcaccgccagcttcatcaagtgctccataaaggtttggagagacacatcgtccgtgaagatggtctgcgcgctctgggctccgacaccgccgtacgctccagctcctgatgtgtgagtggtggagggattgagcttggagaggaggaaacgagcctgggagccgccgtggtcgcaaacaatgaaacgtgggagagggaaacgatccgtgatgaggtcctaatccagagtcagtatgaaatgtgttggaatagatcaggcaatcttgacttaccctggcgtcctccttgggagcctccaggagagcggcaaaattctcgtagccctcctggtcctgataacccgcctttctccattctgcaatggtttcaccgtggaagatgagaatgtggaagaacgtatcgaggaggagaatgtgtgttggctggatagaggtcgagtccagaagcactggttgaccgccatcctggtcgaaagtgtatgaatcgagtgtgggttgaatcatgatgagggagttgctaacgtcctcatggttaagaacatggcgatagaaagctgtctcatcaggcgagttgttgaacacttgcaagaactgacttctcctcaagtggaacatgaactgtgggtaaagcgtaaagttcttctcgaggcggaaagacgaagggtcgtccttgcgatagtcggcaaagcgtgagcacagtctgataagcatcctgtcgacccagcggaggacatccggtccatcatcggtttccgccttgaaaaccgcaatacgggacatcaacacagcggcggcctcctgatcaaacgaccgggcaatcgccggatcaccggctggaccgctaaggtcgcgggcgatggtggtgacacggaggtggaactgaccagacgagtgctggtagtatgtgaggaactgaatcatacccctttgagccgcctgttggggttgcgaggggccgccctgagcaatctcaaagtagataccgtaactggcattggggtcaatgccgcacattttccacgagcaagtattgccaataccgcactcagtctcacccaccgaagtcgacttcttgttcagagacacagcgtggccaatgagaccagtgaccttgagctcctttgtagtcaaaacttcgagaaccgcgttgaagcccatcaggaggttatcgtcggcgtccttctcgaagattcggatgaaggattgcttgaacatggacgatgtgaaactatcggtcaagatcatgtgcccgccggtcgagttgcaaagccccttcatctccagcaaaccaacctgatcaagacaaccagcaaaaatatcgatagtgtggccgttgtgagctgtcctcttagcgaggttgtcgtagaacttcaacgccttcttgtagtacttgatgttgtcacggtcaatgtcgtgatgcgaccgaataggctctctcagctcagggccgaccaccatcccggggccctccgtggccggaccaccagcgaacagcatgatacggccgccagcattctggaaagaggtctcgagcagaccgacagccacagagagagcgacaccagtgcagcgcaagtttctgcgatcgctggcaacaggccatgggtccttctgcaactgctcgagcgcctttgtcaactggaattcggcctgggcgacagggaggaggaagcgggcggcgggaccggttgggaaagctctggtctgctggtgaggaggcacgccagggcgaagggcaggggcggtgaggccgagcatctcctgcacctgcttagcagcatactccttgctgccgcggaaaacgtaagacttcgcgcactcagtgtatccaatctcgtgaacctgggccatcgttccataggtgatcaaaccaacaagagcattctcagggagaaggctcagactcatgatcagggactccttgagagcagccaagctgtcctcctcctggcacgtatcgacgacatagaggaaaatcggagcgctcggggctggtcgtgaaagtctatactcgatagttgtgttggcgggatgaagctcaggtgggatggcattggccgtgatatccttgtaatgcggcgggagggggtttctggaaaggcaaaaggggcagatccaaaggcgggcgcgggtgtcgacctggctgtcctagatgtgagcaaagtggccagatagtcaagggtagaacgtcatattaacctaccagaaaggattgagaattgagcggcagggttgcttgcaggtgacaggctcaaactgcagcaaaggtgtgtcgggcttctccttcagaggggtatacagagcaccgatggggacgactaatctcgaagcctcctatgttgaacattagccaccgaatactcggcagattgccttgagcaggtgcactaaccatgcgagtgcttgggaacacattccaactcagccgaactccatcgcgatcctctacctcaccccacgactccttcagttgttcataatccatgatggcactaatgttcggggatagtcgaattacggagttgcggagatggaaagagtcgaggtacttgtgtgactgggaagatggcggccgaagtcgaggacgtggtcttgtcttggactataggaaaggtggcatcagcatgtgcgagtccagggccttggtgaactggacagcgaggcagacaggtgattcagagttggggaggtagttgggttggatgacgaagaggaggaggcttaataccttcttggtggggttgtggctagctcagagatgccgacgccgagcaatcacaactcgagatggtgaagcgcaagatggcagccgggatcgtagcagtgcggcggataagggagtcgtggtgctttggccagctgctggagctctggcgaggttgtcccctcactggaaaaggacaagttccaggtccatgctggctgttgtggcgcatgcatgtggctggagctgcattccttgctgcagacacccctggcaggttgtcgtgccaagccatttttggcgattgcttggcatcggtcaactcaacttcaactttcattgaacatcatcattctcgagtaaatatttgtctacatatcaaaatataataaggcttgttttccgccctctgtcgatcttttctcgccagatcatgcaaatgccattaacgatgaactacttccacgccatcgaaccttgcagttggagaccatagacttttgttcagttccaggcctcgactcctgctggtctagcaaccgtccaccggccaccggttcttcagcgttgaacggtataactcgagtcatggcagtgctattagacagacagagagactcctgctctctagtatccttcagtctgcttgtcatcctcacctgctgtcttcctcttttatctttctgaagaacatctgtccctcaagccatggcggcgaaatcttttctgttcctgtggtgtcttctaactgccaagatctcactaagccatcgaattggtcctcgacaagcagatggcgatgttgacgaccaagtgtttttaaggagagcattccattcctgtaagtcaagtttcttgggtagtcgttgttgggctcccgctgatacgatgccatacaaacagcggccgtgttgaacggatgggtgtacatcgacggaggcgagttctcctacaagagcggaagaaacattgtctaccagtactgtaagccacctgtgcattttgtagaactccgtctatgagctgacggcttgcagcaaatacattgctatccattgatctttcgaaggattggcccaatgatacgatcgacatacaatcgtcttccaaaccggaaggtgtcccaaacttgcgaaacggtggcatctgggtcgacgagaagaatggagtactatacacggggtttgccgggacagagcccttctttggtgatggagcgctctgctcacagggcctgtggtcattcgttccaaatggatcaggcgggggtgactggagaaatttgaacgatactgccgaccccggtttcgtgaacctcccacggccctacaaaggacaaacaagcagtggcgatggccggggcttctttctcggcggtatgtctaatggagagcatctagggctgtagctaacatctctcctgggtaggcgtcatcagcaatgagacaggccaggagaccaccctcagcaacctcgacacctacgattttgccgctaacaaactcacaaatcagacggtgtctggcgtgtctactcggggattggaacggtatggaggcatgatctacgtgcccaactttggaaatcgcggaatcttgatcaatgtaggcggcgagcaaggtggacgaggacgagtcgagaccgacgagttgatatcttttcggcgagttcaggtatacgacccagagagtcagacatggtttgaacaaaagacgagcggcaatactccccaacctcgtaagcaattctgcattgccggcctggcatccaacaatcatacttatgaggtgctggtctacgcgggctgggaagggcagtatgggtcgtcgtcgctgtcctatgacagtgcctttgtgcttacgcttcctggatttcattgggtcaaagcagactatccgtcacataacccacgacacggcctgacctgcaaccctgttggcggaagtcaagtcttgattatcggtggtgttgacacaacacaacaagctgacagctcaggcgcacaacaacaacgccagcagcggaacggctcctcagataacatatccgattacattagtgctttcagcacccctgatcctttccaccgaggattggcgatatttgacatgcatgccatgggttggaacacctcgtatacagcgaatcctgccgtttatgcgcccgctccagaagttcaggattactacaataccaggtaagccgaatccaaccagaggtacgaggcttgacgctgacacttctatttaggggcctcaagccagaagcaggcttcgcctcaccggaactcgaacacatattctctatcgcccgtttcgacaacagcccagacgagagcccagccagctacgcgcgcagaagtaatacggctgccattgtgggaggggtagtcggaggcgttgtcgtactagccgcagtattcgggttatttctgttcttcaggcgcagacacaagaaacagccactgccatccacggttgtgggtcaatctatcagttctcacacggcctacgacaagcccccgacgttgtcgtcactgcattggcaggagctggcagtggttggtaatgagcagccacatcctgagttgccagtggagggtcatgaacagccccatccagaactacctgtggctggacacgagaggccccggattgagctaccaccggaggtgaaacctgagaagcagcaggaggcggttccagcaccaccagcagagccggagcctgtggaattgcatggggacagtctggtcctgagcgagttgtctcctaggtcgcaggacatcatgaagaacttcaagttcccgactgagcatatccagaagccactttctcggacaaagagtttgtgattactcgcccgtcacgtcaagatttcttttttggtgaaggtcttggtttcaggggttcaggggtaaggcagattgagggcgttgagttgatgattttggtgatgtcaccattttcgctcgactgatgacagtgtgagatttgtattcgctcgcacggagtttctttatattaatacgatagcacagtgtcagtatttcaattgcacggtcgtattcctctttgttttgctgctgagtcgcttgattcgtcgcatcccatctgaacttcactccagcacgggagctgctgctcccgtctccatgcacgtcattgaagcgacagggaaccctcggcgatacagccgcagcgggcatggagcttgttgcttcatcgccatttactatattcaccataagtttttgagctaccattcgcgactttggaattactctaccactttcatccgaaccatagctctcatgtcccattgttggatatatccattttgaagctccttcttacagtactatctgggtatcctccgcagtacacgatgatcactcatatttctcacaactgcgcgataccaaaaaatgccagcagaccttgattttcccgttattttcctcctacctagtcatctaggatccgaagagcttcaagaactcgtagagcaaatacctactctgacttacgacatcaacgaggcagaggtcattctcggaaagatttctcgcaaagagcgcgcgctgtttgagctgagaaagcgcaagcttgccactgaagaagtcgaaaaagatgaacgcacacctccagcctcacctcctcggaagcgaatccgactgtctgcgactccggcccttgggagttcagatctcgactctgacacctgctcagaaggggagatccaacgccgtcttgtaggaccagtttccgttcccaaagtcgaaccaaccgtcaaagttgccaagttatcttggttcaccgactccctttccgccggcgaggtcctccctctagacgacaaatatgccatctaccgcggccgcaaagccatgcagccaccccctgctccagcttcagtccaaaccacacctaccaaatccacctccaacatcttgacgcgagcgcatgaagactcccacccgcgtacacctccttcctctcaaaagcgatactcctcccagggttcctcccaaaaaccaggctcaacctacgcctcccacccagtcaccaaaacccccaaacgccctgccttactaaggcagacaacctctgaacacgacctagacacccacctcccccccatccccccttgcctgcacacaacctactcgtgtcaacgctccaccccagccaaccccccaaaccaagaattcatctccctcctcctccaaatccgcctcgcgcgcaccctgactggggataaaatcggcgtccgcgcctacagctctgccatagcaacagtagcagcctacccctttcccttccagacccaaaacgaagtcgcccggctccccggctgcggccaaaagatcgcgttgctataccaagagtacaaaaccagcgggacactcaaagaagcggaggagtacaagtccgaccccaagcttcaggttctaaagttgttttatgatatctggggcgtggcagagacgacagcaagggagttttacaacaaggggtggagggacattgacgatgtggtcgagtatgggtgggatgggttgacaagggtgcagcagattggcgtgaagtattatgacgagttcttgctcaagataccgaggagagaggtggaggagatcgggggggttatactgaaggaggcgaataagattgaggaggggtttgggatggttattgttggggggtacaggagggggaagaaggagtcgggggatgtggatgttgtgctttcgcatcgggatgaggaggccacgagggggtttgtggagaggattgttgttgggttggagaggagggggtatatcactcatacgctgctgcttagcacggcaaatacggaacggggacaggaaccggttgcttggaagggggactcgagggtggcggggagcgggtttgatactttggataaggcgctggttgtgtggcaggatccaaattatgagggggaggggaggaataccaatccgcataggagggtggatatcattattagtccttggaaaacggctgggtgtgcggttttggggtggacgtcggggacgacgtttcagagggatttgaggaggtattgtaagaaggagaaggggttgaagtttgatagctctggggtgaggagcaggaaggatggggcgtgggttgatctggagagtgatcctgttacgggggagccggcgccggatatgttgacggcggagaggagggtgtttaacggggttgggctggagtggagggagccggaggagaggtgcacgaattgatgatgacagtactgtctaaagaataccggtggtctggttagagttgaattgcgtgattgtactaatcgtgactgtaagctctctggttgggtggtgcggacttatacacacacagccaagtgccggtggcaactgtacatgatcttcagcagttggcgggcgggggcggttacacccgctgcagcccggctttaaatttcaattcggccgcgggtagtcaccaaccgcgaactcctttccatcaattcctccactaccatatcacctcggaaactttttacaaagggaatgggaacaattgcaccggccaaggcgctgagacacggaagtcgggcgaaagcaacctccgtgcacggtgcaattgattgacgctaagaccaccaattagccagaaaggggattttgaatgtggggtagtagaggacaggcaatgggtgatgcgttgatgatgtttacgtagcatcttgaggagaggggacggatgggggaccgcgtgtctgtgttacctgcgtaggtaaaggcttataaatccggggggaatgtttgactgttgtatgtagcattgaaaagaacaaggcaaatcgaacggttttgacggtttgttgctctttggaagcaaggagaagtttctttgggtacagtgtaggtaggggtactatcggcagtgtttatatacccatcccgctagccctttcgatcttcaggtcgctcgctggctgtccacctctaatctcaatctcaaaacctcacctcattctacaacaacctcgacttcacctctcacccacctcgctttccaccacactcaccaatacaacacagtcaaaaatggcccccatcaccctcaccctcccctccgactacggctacgtcctcctcgccgcctcctccaccttcttcatcaacaccctccatgccgtcctcacctccaaagcccgcaaggcctcgggcatcaagtaccccgtctcctacgcctccaacgacctcgccgaaaaggaccgcaaggcctacctcttcaactgcgcccagcgcgcccacaacaacttcaccgagaacctcacccccttcctcggctccctcctcatctctgggctccagtaccccaagtttgccggcgccctcggcggcctctgggcttttgccagggtgttgtttgccttggggtataccagtaaaggaccagaggggaggatgatgtaagttttattttctctaagatgtgatgggtgctgacagtattaataacagtggttctctcatcggctccctcaccgactttgtcctcaagttcactgctgcttatactgccgttggctttgcccttcagtggtgactttgggaaatgtgggggttgccgttgattcattgggagaggtcttggtgatcgattgagtccggcagtgaaatgtgttataagctcttgttttttgtgatgagcttgatagggaatggtaattatttgtggagaaaactagatggccgatttctgacgactgtttggctccaaggcacaggtgatatgacacattcaacaacagctggcataatgagatgtactaaaatagccaggagaatgtcctatgatgtctttgagtacacacacaagtattgttacagaatgtactagttacacgcccatatatacccctcccatcgttcccttgtcccttgaaattcctggggtatgtatgccatgcataaattttttacaccaccgacgccgcccacataccctttccccgtccctttcttgtttttctttgggagatcatatctattgaacaacagcccacctgtctagacgcccaccccccctctatttttctctacctccaagtcttcttccttcccttcgggggcccgcgaggggggccccgagggattcccagcggagtagccttccccagcggagtggccttcttccccttcgcaaaatgcgccgccctatacctctccaaccaagccatcttgtctgtgctcttgctccactccttcaactcatcatccgtgggaaaccaagtcttatacggcaccatgttcccctgggcaatattaggaaacaccgaattgtacgtatacggcgtctcatgcccatacacaaacaccggcctctcctttgcaatcctatcctccatctttctataaaaccgcccagcgcccgtcttcttgggcagctgcccgccaaacatcctataccactccttcttgcggttctcgggtcccatgaggtacttcttccggcgagcgcgggccctcttgtagaggttcatcgcccggtcatccgtcatctcctcaatcgtgtactcgaccgtccactttgtgttcttgaccgtgacggtaggccggtcaacgtacttgccgtcaatcttgttcttggtcgtgaggatgaggccgtagatgggctcggtgaactcgctgtcgatgggggggtctatctcctcttcggagagggcggcaagctcctcgactagctcttcggacggctcgtcagtggcggcggttctggtggtcgcctcggcctggtcttcttctgaggcctcggcttcgtcgatgctgcggaagttgcgcgtcttgacgagcaattcagacatgatgttttcgaactgggcgagcttggcggcgtcttcgtcttcttcgcctgtgacctcgccctcttctattggggagggtgtctcgcctgactcttcttgcaaccgggaggccagcctgaggatgagatccttcagattgagcttctccggagaggtttggctttcgatctcttgaccctcctcggcggattcaacctctgtcgagacctccacggcttcgttctccacgacggcaggttccgcgggggctgtttcctccgccgcctcagactcttccacaacgtcgggttcggtatcctcaccctcttcagccagctccgactcaggcgcttcgttgttggcctcgcttgtgagcacctcaaacaaagcctggacataatgctcagcctcctcttgagtggtgttcttcaaaaggccgctctgctgcagggcgtcctggatggattcccgaatggaagtggcgccgtgctcttcgttctcaagcgagtgctcaaccttgagcatgacatcatcccagacatcctcacgggtgtcgtcgtcttcctcagtccgctcagcagctgattccacttccccttcatcttcctccggccgggtatcgtcaaccaagccctcgtcgttctcttgatcctcaacctcctcttgaccctcaacctgctcttcggcttcatggtccagacccctgagaacccgttcgaatttttgaatgcgctcctgggcagacttctgaatttcatcaatccgttcctgcgtaaccgggcgagcaaaaatacacatataaggaggcgtggtcgcgtgcttgactgtctcgaagtgaatacgcaacgtttgccccgggaactttgcagtcaccttgtcgaggacctggttgagcagatggacgctcagcttgaactcttggtctccgatggtggtgtccgctgcctcgtgaagagagacatccatttcctgaagagggatatactggaagccaaagatgcgctcagtgttgtgataggccacaaaaataccgtccatacggcccatgcgcacctggagagagtatttcaagaaggctgatcggatcatgtcaaagtattcacgttcatacgactcccaggtcccaaaccggccgcgaatctcgtagccttggcccttttcgtatccttctggatccatgcggatcgtgacaacggctctggtcttgagatcaaacatgcccgtcccgggaagtcgcggatcgaaagcgtcgagctgtgaccgcatcatgaaatcacccatcgttgtgtaatggtaagattctgggccattcttctcctcgtcggtgagctgatcagactttgacttgcggtacttttcaaactcctccttgggcatggtcaagaacttttccatcgacttccccagcatggccaaaatattgcccgagtcaaactccttgtcagcatcaatagcatatgttccgtccttgtggtgcaggaaaatagccgctgggcttctcaagattctgttgaagtcctcgctgctttgctccgggtcgaactgcttggacaacatggctgtattgatcggacgccaggaagacagaaggaaatggaaatgtgcaagtgtcgccgtcatactcgaagtcgatccagagtacttcttcttcttcttggctgccacaccaataagtgtcttgtccctggacgatgtgatgtactccttgagcgcaccgaagtcgaactcgtgggtgggcatgatttgagacagataggggtcatggttgtagactttggatcgggggtcctgaagataggagactccggggttaaacagtacgcgatcgaggccgtatgctagtgtaggtaccggaggttggcgcagttcaatgggcttgagcctgagatatctcgggtcgatttctttgatatccaaatccggcttcgcttcgtcctcctccttcttggcctttttcttcttgggcttgtctcctcgatcctctcctgcttcctcccctgcggccgctgcggccgagtccgcggtcttcttctttttggcagccgccggtttgctcttcttgccgagatgttttgttttggaaccctttcgttttttgagaacaccctccttcaaaacctttttcatggcatctctgagcatatcctgatcaccttcggttccggcggcatcggtcgatgtcgagaggtctgtcgcatccttctccttggcggatttgggcttgttctttggtttccgtttctttgaggtttcctcggggttttcgttattctcggctggcggatcggatgatggaggagtagcatcttcagtagtggttgctggcgccgatggtggtggtggtggtggtgttgtcgaatcagtataccatcgagttgcaccaagatggttgatggctactggcaaatacctccggggcgcagggctctgggcaaggagggttcgacatgctgagcatacaaatggtaatttgagtgtctgtcgagcctgtctcgccaaatgcaacattgtggctgccctgttcgtccgtggaggatgccgtagaagccgtttgaatgtctgtatcagtgcatatcttttgcgcgccgttgttcaatttttttgcccttgtccaaccgtgccaagccgctaacgacccctgctctgctgccattccagcgccaaggcttcaatgacgtcgatctcttcgagaagcatcaatgttctaggtaatatccatttctggtttttcaaagtcggtaaactctcaagggggatgctcgtgtagaattcagccctttatgatctgtatcttggggttttccttacctctaaacagtttcctaccttccctaaccttccatgccatgtcatggtcaaattgactggcattgcaaagcaagtcaacaaaagagcgcaccctaaaccacgcatttataggctctccaggatagctggcagcctgttctctctcttatgttgcgagtaagtcgtgggccgtacatcttcgctaacttgcagtgcccgttatcttgatcacctcaacaggatagaaggaggccacgcatccagtaccaaaacacacaaacaccaacaatatcatcacgcaccttctcccaagtgtcatcacctgcttctgtacttgaatacacgtgtactgctttcttactcggtcagacaacccatctaaggcaggtacaccaaaatcacgacatggtcagcacacatgagacaatgtccaaaaagccttgcctgtccagaaatctaacccccacgctcacctcgcttcatgggcgttacacagcctctctcctatctctgtccctgtgtcgctttgccgttatgtgccacgcaaaacaatatcgacgacgatggggagccttgcttcagctggggtctcacagcggaaacaaaagacgacatcaacatcaacaaacaaaccaaaaatcactcacatcttcggcccgtttcacattcgtgctttgtggtgatagtgatgttagctatacccaatacaaagtcgcccagcagtgggtgtcctcggatcttgcaccgtaaataccccagagtaaaagtatgtcagcaatgcatcagccactcatactgttgtacctgctcagccagccatcatgtcgaacgggagctgggcgtgggtaagaatatcctgtccatttccaagcgcctgtgtaggcctcagcatacctacgtagcccgagcatcgatatctcaaaaccatcagatcaagtacccaaacatcggattgcccgagacctgtcttgctcaactgcattccacacaagactttacacgctcaactgtagaccgcccatcctcgcactcagcatccctgagtccaaccgctagaaacattggaagtcgatccgattggaccaagcgccgctgtattgcctcgagctttcgggaagatatccccttcctgacaaaccagatgtatgcagttgaccagaagagataaacaaattcccagctccggccacaaaacatggaagcctagcaagaaacaagcttctctcccgctccccccttaccgcaggccgcgggtgaggccgcgcgggcaatttctggtgttttgggaaggagtatctaccggtattggttgtggactaggggagaagccacagccgcagtcttgcgctatctttgggaggcacgcaccagtgacaccacaaggccaagagcagggatggcttcatgaggatgggggttgtgaatggaagatgccgattgccggggtggatggtggtgatcgaggaggaggttacctagccatcatcttggccctaaatatccccaaaacatgactagtgatgttggttgccgacaatatgttctcacactaggtatgcgcagcgtatacaacagaccgcactgcaagaacctcacaccacctcctgggccctctcaaacgacgtggtttcacaacctgaaggtcacctaccctgctcaacagctttctgcaagtcatacttcgcatatagctatctacgacaacgtctcttgcgtgggtttggttatctctttgtttcagatcctgactcacctcacacccgttgatatcaacatcattcatattccgactcccaaaacagcagttcacttatgcttgtttctttttcacacatgcactcccgccacctaaccctcccccccttacacaaccctacctgccaaatccacaaccatcttcccacagcaacccccaacccttgaggcctcaccttttgtttttaccttgccagcaaaggtggcatttcttcttctcccgatgatggatatcgaccaacctcacacctgccctatgtattctacaaaggtagccaagggcctggacttttttgccttcaaaaacccccacccaaggaagcccaccgccatgtagcggaagatggcaaggcaatttgtaaaaaccacatgacacacatcacctgcttcccgcgggggtgatcgcaaaaaaatatggcgtggcgggcaaaggagaataaggcgggaagctgacttacgggtaaccgggggtttttgcatccgaccagccctttttttgccctacgaatttatctaggaaaggaaaaaagatgttcttgatcaagaaggtgtgcaaaagcggtatataggtatgtatgacttgcattattcgagtcaccacaccacaccttgtttcggagcattgattgcccttcttgctgttgtgtgttgtatgttgcaaccactcctctcccacctcttgattgtaacgtccccttcttttccaccgtgctatccagtcccctcatacagtacgggaacacatccccccatcaatatctcccctcccaatcttacatacctatctctcaaacccttgataatcacaagccaaaccgaaccccttctttcaaaacccaccatacccccctcatgatcattcacattttttttcttccatgctgccaaccccatttcgtctgaaaatcgatcggaccgttgacaaagatctccaccttcatcccggccagcctagcgtgccttgcgtgggggtgagttcgccgggtgcttcccgcaaaaaccccaccacttaacaggggtttctttccagtcccgggcggaattacctaatgacttacacattatttctttccctcaactccaatcccggcgagtggtttcgcccacgagggttgggcgattggttttcggagagaaatccgactttcggacactaaaaagaaactcggaaggtttttttttgttttttttattaaaaaaaatcatgggtgaggttgtattctaggacttgtgggtctaggtgcttgagagaattgtgagaccctggaaaggcttgttgtgatggttcccaaggttgctttgaggtttttggatcctgttagcggccgttgtaatggagtaggtgagtctattttcatggcctgggcaggtatgtagatcaagcatgtaagtgatggctgtcattgctttatctgtcacgggaaagtctagatctccatttcacatctggcaagttcgggaatgagacggggacacagaagccatatcctggttttgtaagtgtatagtggtgatatcgaccgaggaggtcaaagttggctggctgattatgagataacagcgttgctgtcttgaaaccgggcagatcaaggttgaagatagaggtggtcgtgagaccggcgagggactgctattatatgccatcactctcgtttgacttcttgataggtcaatcatcttgttctctgggaggtggtgagttcaactcccctacccatgatgcagctagatggcatccctgctgcggctctccaacttgctttttgctcaagaacctcaacaccaaaccctaactctccttttcagcttccgattcccctcctccctcttccgaattcctatctgcttgcttgcttgctcgctgcgtatcagcgtgtgggtatcatccgccccgccagccaggcccttgcttcccgtgtcgtcccaaaccattcatcggaacggctgcaattcttgattgactgcgggcatgcaacagcagctatctcgcataccggtacggagtatggccttcggtagtccagatacagaacaactgacgagttattaggatatacgtaccgagtcattcttaccggtttcttgtcgcgatcattgaactccttgctgccatcccagcatcaagcacgacacaaaaaaaaaacctctcttcgctctcgcttattcaccattcatgcccaaagtatccagtcaaaatggtcgtgtaatacgtaacaattgtcctcttccaccccccccctcttctgcctcagccgtgtgtgcggcgcggttgcccaacttcttggtgaatcagaagctgatagaacaacagaactgatatcgcgataagacgtcggaatggcgccagtgtagcggtctgccttggtcagagctgcaagcacgcacacaaactgtgtgtaatctgtctcactccatctcccgggatttgccttgtgtacctgtgtctcggaggctgtaactgctaaataggcgctgcagctatcctatcaaacaatctcgtgggggtccttctcatgtctgagatcagtctcacagaggaacaagaccagggctcagaggcaggcaggtacccgtgttatcgtcactcatcactctgtgatccaagtgaagccatcacgcaaggtctggtttgctgatacgtctggctaaaggaggtgttcacggcatcgtgttaccaccctacgaccctgcgggaacagtaccgtgtccgcagcgcaggaagatataatgccgcacaagtaaaatccacctcggatggcaaatgtcatatgcctctctgcttgtcggattgcactgcaggcggccgcatcagaaccttgacggacactggggatggatggctggctggatatggacgagcgagccgcccatcccgctgtggatctctgtgccgtcaagcaaagaggcagacatgtgtgttgggtcccaatgagcgttcttatctgtatcatgagaccattcaacccaagtatgcagcgatagcaggatatcatggttggatggatgggcgatgattaaggccgctcatcgcccgagaagcaatcaggaattccgagagcgagtccgtgtagtgtaaagagggggatgcaacctcgattcgagaagataagtcggcgagctgggtatggctccagtaaagaacgggtgaaacgtcgtcgatcctgagagatcagtctagcatgaaatacagcgatagaggagcgcttgaagggtgatccggtcatctccattcgcgagtgctttgattgcttggccaccgagctgccggcacatctaaccaacggttctgccacatgcttgaatgtcacgatgggagtgataatcagatagggcgggcggcgttaatcagggatcgcccgaaagggaagtaccaaggagcgggccaagaattcgagaaagagagatgcagtcaagagaggagacgtccgtgtgtccgagagctcaactgagatgtccgtggtgcggtccggagtcctggtcgatgacagccaggggaggctgtgagatgtcatgattgtcaccaaggggcacaggggcggctccaacggtcgaggcggctcgagcgctcgcgtcttgccttgcctgctgcttgcttgcttgcttgcttgcttgcttgtgctgccctacgatgtgtgtttgctagtggccaggtctgtggtattttgcagtttcgtctctcatgacgccttatctctcgcctggcaggttggttgtccctagaaggtggaagctccggtggcatatgttggctgtttgctgtttgcgggcaacaacgtacgatttggaccgattagattctggaatggtcgaatgggaagtgtcccatgccgccgccaggccttgtcgttcactttcttggaaaatggtatcttttcgacctgtttcgcatcggcctctgtgtgtgtgaacagcacaagagggtccatcggctgagcggtcctgcatctgagacgtggggcttcatgacggcagcacgcatgcctcaggcactggtagggacacagaagaaaaacgcttatctggacccccacagacaacccttcgtcatccatgtggcttcccttgagctggccggttcccacccatgatccctgtcgctgacccgtccgaccgccccgtgtcactcgctgataaagtcgcaggttccttggcccccagttcgtcaagaaagttgttgtatgttggacgaggccgagccccctggtttgaccgtccgtccactgtgaagaaggaagaacatcaaggtgccctgaatatatcgtgagggcacctcaacgggcacctcggagaagaaagaccctgtctagctgcaaccgatggtgggtgaagcgggggaacggtggacttccaagtggaccaaggtgtgctgtcaaaaaaatgggaaaggaggggaaggctccaaaaagctggggaagaagagccacgatgaagggctttcccagtcacaagctccgagtgtagcttgtgatgctcgcaaaagaggaatagcagacaggaacaaacgggccatttctccacggttcgttcgcttccctcaccgtccagaagcaggtgcgaaaaaggtggtgttccaggttccagtcaaacccaccctctttgcccaccaccccgcgggcgacacacattgcatctccacgtcccacccgcgcttgtgaaaaaataataatattggcaccattggccttgccctctccgattttctctgttcaatgcgcccgcacagcaccgcattcgcctgtttgccttccatgtaatagtaatactcaagtagaaagtataggctcggtgtgttccatgtgggatgatggggtcatatcctatatggtggtgcttgctggatcggcgctctgctttgacaacaggaccaggtcttttctcctaaaaccaagaatgagtgtgtgtctcgggtccgagtaggtaggtatgtagatggtagatgtcgcgatgagatgctcgtctgtcgttgactgacacccgactcactgcctgctgtgaccgccaaagacatccatcaacaccagtaaaagagcatccatcgtcacgtcacctttcgccatcgattgctggaccggggtgcattttgaccccaaagtatcttctgccgaggggttcggttccgtggaataggcgggaacctcttcccatgcccgcccaccgcgcgggagccctgtatctcgctagtgatcgagacccgcgcaatgcctatcagaacggcaggtacttgggccaggtagcaatttatctccctcaaatcctagctgccggcgctatctcgcagacctgagcactccctccctctcttttctccctgcttttagcacttgtctgcaatccttaccaggcgccctgtttgcttttttttgtttgtgcccatcaggggagtcttcttccaacctcgatcgctgccccatctcccgttttatcgctgctgcattgcaatccaccagggggcaagcctacccgtcccagttcaactaataacaaaagcagacgaaccaccacccgcccgtctgctgccgacgtgagccgcaggagcgagcaccacagcttcaacgtcaactcatcttgaagacccccccttgggaatttacttatcagcgccacgacgggaaacaaaacggttctcgctcgccaagtcatagtctgccacggccgtatcaagacctggcgataccgtcatcgcttgcctacctatcagagctccctagtctgcaacccacatcgggtatcagatccaccgccagattcggaccacgcctgctgcgccaggagaatttcaccgagggcactccgttggacccaaccctgcccctggggcctgctgtccgtttatctatcggctggtccctgactccctcgttgccttgcttttgggtcttgatcgcacatgggcgtctgactcccggcctacaagcgccttccccggccatcatccctcccccccaattcccggcaagccctttgtagcaccacatatatacttgcctgcagagagccgcccccccttccaaaggacccagacgcgatagccatcacatctcacgcaaacgggcacgcacgcagatagataccacgcaccgcccaccacactcaaaaagcctcgcgttccccttctgtcgccgccgccactaccaccaccaccaccactatcaccacaaacattaacccaacccgtctctggctttcccgaggctgtggatagcttatcaaccactaccgcgccgctgcctctgtttcatggataacatccgacctgttcagccccgtactgccatgtctgagttccggtagtctttgtcgtcgttgggttgttgttcttacttccacctttcccctcactctcaccacctttgaacaccatctcaccttagtgggctcatattccgaccctctacatccttattaaggcccataactcgggcttctccctcccgctcctaggcgtcatcatcaccctctcatatcacagccatgtcgactccttccggatccccgtcgccgctacaggtggcggccaacagctttgtcgatgaaaccaagatgcccaagggacactgccgctacatcctgcttcttcccgaaatcaagggccagcgatgtgcctgtgtgggcttttcactcaataaaggcatcccaggtgccagttgtgactgcggtcacttggcgtgcttccacaacaaggagccagaagtggccacagactcgaagcaagagctggaactcttgaagaaacgcattcagcagcttgaggatcagatgaccagagggcaggatggtgtaactgaaactcttgtcagcaggatcaacgaaatggaggaacacttggaaaagagcaaggaagagttcagtgaacagatcaagggcacctatcgaaatatcaccatcagttggcgatccatcgagcaggccgaacagaagagcaagcagcaggatgaacagctccgccagatttatgaaaagttgagggaccacaacgaacaactcgagaggctggacgctgggcagttggaactccgagatgctgacctgagcctggaggagcggatcgaaaatatcaccgagatcttggaggaagaggaggaacgccgaagatcatcacctgcccggcgtcccagaagaagatcgacctccgacacatcacgcccaaacctccctttaggggagggggccgtcccgtcagacgactatcgtcgcccatttccgccaacggccggcccccgcaacccaggacatggcgagggcctcgaacgaggcgggaccgcagcgttccaactgatgaaacccctccccgtttctgcccggtccacgggcccgtggacagtgcacatttcgctcctcccgcatgcgggtgtgccgatgcccttcgagcggaacaccaacgcctaccagcggtgtctatcccgaggactccaccgcatggttgcagtccacggacccgacgcagagtcgttcaacagagcggtggaggaggcattcggcagcttcctgaagggacgggagtggatgccgctgcaggcgaagctctgcgacgccgagacacttcagggtcttccgatgcttcgtcaactggaccctcaactgattgatccaaagaaatacgaccaagacttcctccgccaccaatgcggcgtctgcgactccaacggcatcatcgattcgctgtacatcgccatgaaatcccacaccatttcctggcacaccttgaggcattcccccgtcttcatggctggtcttgagtcgtgctgggcatacgacgcccttctcgacagagaccaatacgacggcgacatggctattgacgacgaggacagaccggcagcgggcgatatcaccaccatcttgcctccaatccaaccgtcgctcaagaggcccctcaccgaaatgtcgcggtcaaacagcttcagtgccggcgcagccgaaggggaagacacgcgaaagaagcgagcatgtccagtcccgcctcctccaggcaccattgtcgagatcaggaggcgcggtgttggggcagcgtgactagccaatgggttcgaccaggagccacccattttgacgatgcaagataatgcgaaacaccagagaacaagaaacgataaagtgtgaccatagcgctgggtaatgttatagatcaggtcggcaggcaacgggcgtttgatggagacggggcgtacaacgataaactggggggacatttggagcaccaaaaggggtgcttttgtcggctggtttcatgtttttttttggcatttgggggaaccatttttacccccttactttatttttctcgaatctcctgtcaatcatcaaatttatacgttgcatttctgtttcttgtcggggggcggaggatttttgctgaggaatgatccaagatgatcaaagctatgctgttgtttgtaagagaggagttactgtcatgggggaaggacagaagattatgatgaatgagcggtgggtttaccttggtagtccttggaagtttccggtggtttttggacctgactatgtagacaatcccatgggtaccccggacttgtacttgactacttgtgactgtgaagacgccatatgagttgctgatgccatgtctaatcgaggggcgtgagaaatatatggctgctgagatgtttgaggggtcaaatgatgcatgaacttggaacagtccgtcaggtcgtagaaccgagaagtgtcccgctccttcctcgaatcgccagtcgtcatcaccgctcttttctctgcctgtcgaaacaatggaattgattattgtttgggatatcagccaatgacgtgctgtcgagattgctcggtttggtccttataagcagggcctgctttgtaccgttttgcaaacaatagaaggccttttcagttctctagtgtcgataggaaccaacatactcccaagctttatatttcttttctctctgtgccagcctgtctctccattcttggtccgacgttgaagtgagagcatcaggtgggagatcaggtgacttgggccccaaatttcacctgccaagaagtcttgtcagcagccggccgctgtggcgcccgagccaggaaccgcccagtgcctagggacccacgttatcggcaggcgcatcttcaggtccgtcttgttatcaatcgcgtccagcgcacctcagcctggcgcaacaattgacagccaacgactgccagccttgcattttctcccaacctcagcaacccattgtgtctggagacattgggccctgctgtcagctttaacaacgacgtacgacccaatttccgaccgagtcgtcgtttccagccattgattcaattttaatctcggcgcgtcacctatttctcacctatttgtcaccttacgacccgccgcgacgccaacatggatctcgacattgagatggacgtggacgacgtccaggaggtcccacagcatatcccagaggcatacactcatgatataatcaccggcgaggaacaggttggattacttcacgtggcaaatcacccttgccaagcatcgctgacaagttctctgtccaggaacccggtgaggtcgacgacatcccagacgagcaaaacggcagctcagcagagagtgttcgcgtgcccaacaaggttcacatccgcggcctcgacaccttcacccccaacgatgtcaagggctacctttccgagcactacggcatgatggagtttgagcgagtcgaatggatcaacgacagctcggccaattacattttcaaatccgagtcggccgcgcaaaacgccctgctttctcttgcggcggttgagattgccgacctgagtcaactttcgccgcttgagatgctgccagccaagaacttttcccaaaagccagagtcgaacttgctggtccggtttgcggtggcgggggacaggaaggtgcagggggctgcggcttatagtcggttttatttgatcaacccggagtatgatcccgaggagaggcgccggaggggggagtttaataggggcaagtatagggatcgggatgacaggcctcgcaggaggaggagggagagtcgttcggaggagaggaatacgtttgatgttaatctttatgatgatgatccgaaggcgttgagtaatcgggttacgacgagtcctaggccacgataccggtcgagatcggtgaactcggcggattttagaagggaaaggagggttaggtccaggtcgagggagaggccgaatcggaacaaggagcttttccctgagagacggaggccggcggttgggttgagggataggtctgcttctccagttagggatggggatggggatgcgcagatggatttggaggaggatgctcgtgctgtggctgttcagcggagtagagaaagaggtcgggagctgagggaaagactgtctagggatactaaggacaaggagttgttcccaagcaaagtcacggcaaagaaggagctgtttccagagaaggctgggttggcggttggcagcaaggcacagatggatcaggtcactaacagctcaactattctcgccaccggtatgtcgcagcttactcttcaccccaacaagcctctttttttctagtcacaacccacttttccaacaattattcagctcactgacaccatcttctactcagcatcactagcagacaggataacaactcgaccgacggcatcaggaggggaaggggggctgaatattcgtggcatggctgggaagcaagggacaggtcaggggattgcgatcaaggggacgggggccaaggttaaggagttgttcccgggcaagtttggaagtggggggaatgctgggaaggagttgtttgcggagaagttggaggggagggggaggaggaggcagagggcggaggattcttggaattgatggggggtggacatgtatatgcattgataaaggcgttcaggggaggcttgatttggggttatatagcactgttgtaaggaaatctaagggcatggaggtttctatcattggatatgtgagttgtgtggtgagttatgtggctggtgaacgatgtgtgatgctgtggaaccgatatcagagcgatgattgatgcataagatggtgttcagggggggtatatctctacttgcttagtgacatggaaagaagtcgtggaggtttctttcagcttgaatacgtgagttctatatgccttgtgaatgatggatgctgggtgagtgctggaagaagaaagagcaagttgaacagttcatgaagaaagcgccagccaaccaactccttcattttatggtatcagttgctctttccatccaacggtttcactctttccatctgatatcaccctattcgataataacaacggcgactgactaccccacggccggtaggtgaattgctctttctctgtttatgtgtaccctaacggtttatccaatggcttttctttggggaagttacgtccgtccttctttccttccttcttcctgaggcatgtggttttgacttttgcacatatcttcaacatcggcttttttgttgcggaaatatgttcgaccgacatcacttttacttaatttcgaggtcacttgctcacctgttctgaaagacgacacgacaaagtggatatacaatggcggaaagcaacaacaacaacaacaacaacaccaacccagcagcctggttccggacatttggaaggtcgaagagttcgctgcagacgccgaccacgacaagcccgagccgtcccgcgagtatcaccaccacgattggtcacgatgccccagcaacaccaacacccgacacctcccccggccgtctccgcgcccgtccggctgctgctgtgagacgggtttcctcgctgtttagtcttgttggtgggggtggtggtgggagtatcctgtcgggtgggagtccaaaccgagacagcttccctgatcatggtcttccagggagggcgccgcctatgggggctttgccgctcagtgggtttcatgatggtggcggtggtggtgtgggattgcaagggctgatgggggggttgggggtgggagggaaaaggggggaggaggagagtattgtttggtcgaggccgactatgatgcagatggtggagactttgaggggggtaatgatgggggttatgaggatgcctgatcgagggaggggagtgaggaagatgaagggggaggcgggtagggagggggattgggagaggatggagctggagagggatagggagagacggtggggtgaaagggggggttgggggggtttgccggttgagtgagtacttctttgccctgatgctctgacaatgagtttttatacacagatctactttctctaccctcggttacatggggaatctccccttgtcttggcaggactatctcaagtgagaactgtgaactgtctttgaggcagggctatgttcaaacgaggctcgccacagcattagaatgccctcaagcgagagccatcctctcagaggactatatctacatggatcacattgtctgtggaaattatcccaccttttggcggtgcttggtggttggagtccaccactggctagacatcccacggttgcctggacactacataccaagctacttcctacatcctcatcttatccacgtagtacagaaagcgagcgtcctctaactaaatcttgtagatataactcgcatgtgctcgttctcctcgaaggcttcggccatcttgtagagcagttgaacaaaacccaggaagagctcgccgagctcaagaacctgcgggagaaggaagtcgaacagttccgtggcatcagcgaagaatggattcaacgagagaacggctacaaggctgaaatcaagcgtcttgagctagtcctggcaaaagaaagcaagaacggcgtcgcctctgttgcattggctagacatggcagtctcataaaccgctcgggaacgaaaagatttcaggcacggttgaagcggttgagcagttcccaagatgccggtaagtttctccggacctccataaagccccggagactaggctgaccacgagtggcagataacaccagagaagcccacgccgacccagagcccagcatggtgggggtgaaagaaaccacgtcacgttacgaaacaatcggtaagtaattcttccctaaccgcggagcttcccgcgggtattgacggccgcctaatcgcaggtgacattccacgggacgtcaatcctcaccgtgatgtattgctctcccgcctggtcgagaagcagggcaaagcccagtcaagccgacactttcaagagggggaacgagtcttgaaccaaatactccctgatactgggcacaccaacagaccaaaaagcccaccaacccaccgaaatcaacgtgacgaggatgacgaggacattgagtgccccgcgtccggcgaagttaccctgaaagtaccaagcactagggagcgggcatcactgtacgaaaaggggcaagggggagccaatgcaggtcccaacagtcacgcctacgctggcgtggcaggtcgccccattgaagacccatcggccgatgagtcctctgctagctcaagatgggacgcggaatcttcaacatctgacgattctctgcaaaataatggctcctcattggtaggtccccagccacgacgatctaacgattcgggacctgggctgtttgacggtacaaacagccagctagctgataacggtctcggcgccatagacgaaggcacaggacacatgctcgatacagttttcctgaaccgtggatacagctttaaacgaggcgatgacgagcatcttccagtgacctcccccagccacaggaaagtcaaagggccggattctgactcgatgtacctttatacatacacacctttcgacgatgtatccagtgtgaggcctgactgtgtgggctcgccgtcagagaagagaccggctcgccccgcaggtctcgctccctccacatcgaccggctctgttatttggcggggcaatgacgacaccatcagagatgaaaggacccctagagctagtgcctgcgagaaccagggcgaagactcggacggtggcagtcaacagtgatgttcacgtctcaacagttccacgttccggggtcgttaagctcaggaggtgacggcgagggtggggaacggttgagagcggccccgttatctaactgttggttcttgtcgtctattggcggtacggttaataacgacggcaatgttgagcacgtaagcccaccggcccatctgagcttacagctatcaaggtgaagcttttgcgtggactcgtcgccggctcaccgagaaccttggacagaatctgcagacacgacacgaaggccgagggtcgaccgagactctcaccaaccttcttgtcggcatatgattcaggaggtacttctcggcggcacttcttctgggcggcacttcttctcggggggacttttggggtttcttggaccgaaactctcacgagcgttcttgtcgatctgattcagaagaaggtctatctatgcggggcgttgggcgcgggctttttgggtttggggtgagaccatcaccagccttcttgtcggtcagacacggggggggggaggttaatccctgaagggaataatctccctgaagggacatctgactcgtgatgggtcgatatgggggagagcgatggagggatggtgttgtttataattcttggaggggagttaaggggttcaagggcgagaaccttgatgggcaggggtctggggatctcgatggatggattcacatgggattatgaagtgtagagagatttgtatgattttgtatgaaatatgaaggcttgtggcagctacgttcagtgaatatctacatgattggtgtgtgtttgtctccatggaacggttatacgtgttgtttgatacctggtaaatatgaagactctgtcgtcaaacggtatgacaattttcataacgggtataacgggtttatgctcgagatatgcattgaacgtttagccacgtttcagggggcgaaaaatgactgactgaccgggacaggcgcgggactaagagtagtgaggcgagagattgtgggcaaatgtgacctccttggttttgcaatccaagatttggggccgaagccatagtgtgtgccactgttgtctgggtgatggctgctttagggggcggttaggggagataggaaggtgttatcacgagggaaattgtgctcattgtggagggtctatgatgggtgtaacttcttggtatccaggataaaagtgaagtcgtaatactaatggcttgagtggatgatccggggcgcgtaggcgtttgttaattaagggcaagtgttgagaggggggaatggaaagctcttgaaggtgggagtaagaaacgaacaatgaacgaggcttgtggcgagtggaaatccaggctgtatggtgctcgtggggggagtgtagctgttgtgacgtgggttggtgatgcctcgcgggttatcttttgggctgaggtcgggcttcctaggcatgtttcgtggtgatcatgtggtgttgaggcttgctcagctgtggaggctggcgaacgttattcacctgaaaagtgataaggctgatgttgagcgttgaagtctaacgtggcgttttgggaaacgttgaggtttcacaaattcgtggcttcggcaacaggataacgtttggcgacggttgaagctggttcaataggttttatgggcgtctttctagaagtttgatggacgcatgacgatacttggcgctttttactaggagtctttgctgccatttcgatgcccttatcgtggctgcctagaggctttgatgatattggcttttgccactatgcgtattgttctgtttttgtgtttgggtttgcgcattcatgcttggatgttgcctcttttctcattgtgagtcccatgtgactccctaaccgttggggaattgtggatatttgggctcacgtataagcaggtacccgtattgctatttcaggccgttgactgcctggcagttggtgccaccttttgttcccggacaccgggttgctcacgaggccacagcggagggtgacggttgccaatcttcgccgttgaacacgcggccggggctgatgtgaggtgaatgaggctgagaacttagacgtttgatcccggtttcgccggctgtaccacaggaacgttgagatagagtggcggctattccactccatgaaccacgcttgagaatcgctggacaggagcgccaccattttcgtcacgactgatggctctggctacacctactaacgtaaagcctcccgtgatcgaggatgtggagatgggcaagagggttctcatggtgtaattttttcttgtgcgattgcgtgttgatccaatagggctggaatacatgaagatcaaattattctcgagttatttcttgaattgatctcaggttacataagccgttgcggtgagccgttaggatctgttgaaacaaaccctttgttttcccaacgactgtcgttcataagaagccctcaaaggtaaacaatgacgtaagctttgagagtctcatcatcgcaaattgttgttgagaggcaacacatatgtctagaagtagctcactagccggccctcatatatatgtatgtttgaggtggtatgaagctcttataagcccaaggaaactccagcactcaggcagtatgttttaatactttgccctgaccagccccggtgagcatcatcgtgagctgctgttttatgactgttgtgtgtgtgtgtgtgtatgtgtgtgtgtgtgtgtgtgtgtgtgtgtgtgtttgtccagacatatatcgcagttgctcctgccatttcttacaaagataccagcggcgaacagaacgaggaaggtgcgattgcgattctcgttgcccactcaagaggaaggcgcgactgccaccttaccagaccttttccgctgaagcttaacctggaaacttctgttcttcctcttctttccatcccacagttcaatctttattccaaactccatcaccaaagtaccgccttcggcacgaaaaagataactatcacaacaagtctcactcattcaaaccaattttcaaacccgaaggatcttaactctctgcagcccagtttttgtcaccaagatggcaccttactgccatcccagcccactttcacacgacaccctcatagcaatgaaacctcggtacagcaatcacataacggctcaaatgcaacacaccatgccattcactgtgtacatcatcatcccctagctaattacctacttcaaccaccttgccgcttgcagagtggtatactgacatcaggctaataacctgcttgcacttcccgtctccgttcgctacctgtcatatgtgaaacgtccttgtgactgcattgctcttccaaatgcgactctcggagtcgtatgacaatgtattccatgccacccacccaaccaacattggctgcttatactttatctactttcgtcgttcctgacttggtgtgggtgtggctgaccgttgaaccgttgcagattacctgcacccactcttcgtcgctgggaagccccccgttgcatcaccacaactgcagtcccattctctctcgaaattcacagaacgacatgtcaacgtcgatgaagttatcattggcacccgcgccgctcttcgtaccagacaaccacgatggctttcggaacggcgccatacggtacgtaccgggaccagcgttcgggttcgggacggaccatcaaacggacaacggatcacggatcacggatctccaaacctcaattaggcaggtcctttgacaactttcctcccccattcccccacaaccaaaaaacgtgcaaaatgatcacgaaagaggcagaaaacccgcaccttgttccgatctgaaaattcgataaccgaaactagaccaggagcacgccgccgtcgcgtgttggggctgtttcgggtccagatcgtcgggactgttgcattcgggttcttggaatcctgtagtttgcaacatagacgatataaggaaattaattggctgcttggcccggcgaccaacaactacataacaacgacaggcaacagtagcgaccgaagctgcaataggttgctttgtttacttgtggtcgcaaacccctatttctggtggtggtgttctcaggggtaagtcagcaacaacgttttctattgttgttttacctacttgttattttcataatatcctttcaatttgtattctgttattttcttttactgttccctctttcattaattcactcggcatgttaacgtcaccgcctcttccgttgatcttgcaggatacatcctgcatgcaactcaatctagtggacgtttcttcccacctcttcctaatcggtgtgagggtgggctttttctgcttgcatgatcttttctccccacaagctccaacggcttttcttgcgcatcgtgggacacatcggcgatacccgtcgaactccattccatcacgattcttctccggtctagatccctctccagcccacattctccagacccttttactcaccgcatcattatctgatccgtcttgatcgggcctattgggtaatacccatgaccccgggctcccgacgggcggccagcgccgcgtgaaaactctattgtggggtgccgtctttttaccacgaggataaaagactgaatcgtggagattatgttgccaagcacgcggtgacctccgagtagttcttccttgcaatgcctcatgtaaactcatcgccgtccaggacccgactcaagctcggcacggtgacgccgggccggatatgctgctgaggcgttgttggaggtggaagctgagaggcggtgccggccgaggcggcaaaggacggcacaagaatggaggcaggtgtggtgaaaagtggaagactcttcaaaaccatcacaattagcaagggttatggctgtcaccgtgaaggttcccgtggagaaacggctgtgaggctgactctccacctgaggcttcacttgagcctcatctgctgatccgagcacatcgttgtttgaggtgatagaactgacgagccggaaaagccgcacacaccactttcctgacagcaaaggggtctggacctccagcaggctcggtatctcggtatcgctctcgcgagcttggcctcaaaacagaggttgtggaagggctgttgggtcccagatcgaggcttgcaagtgaagctgaaaatgagagggagcaaggagatggtagtttgccactttctttatcaatctttgcaaaacgaagccagtggtggacggcgttcttgggagttgtcagttcatcaaagacagctttggtgctaaaagatagcgtccgtcaaagttgccgtatctcggtaagaaacccgtcacccacgtgtttcacaaccgaatccgatacgatctttttgctgacaagagacaagccgaaccaagacaagaaattggagaaccgggccccatctttctctcagctctccaacggtttttttggacgaacggttttgtttttttggatgtgtctgagagtttaccaggactcggcctgtaagattttgtgggcactcccccaccaccacaaaaggccgacaccgaggattgtgggtgagtgtaaaaactccacaagtttctcacggacagtggaaatctggagccgattgtagtagtggtacacaggcataggttgacgatgagctggtttcctttttgggaatgtaccaaggtcaaggtgtgccgttagttgtgagtgtaacccatctccttgggcgcggtgggcttggcttttttgtgggtgtaggtagtttgtcaaagctttcagtgttgctagattgtgtggtgtggttgtgtttggatgctgcattacagtggcaaaaaagaaatggtgaaaagtaatacgggaaaactacgcccgtctctgcagttgaggaacttcgaaaatgaggcacaggtgcaagtttgtgtgttacataccgcctgcaagaacatggcccagccagtccagaacagtggtgtggtgtgctggtgtcagatcatcaactgtttttttttcaacggcttctccgcgcctatcaagatagtgcgcgatctgagggtgaaggggggccacggggccaagggaggaagaaaagatagccagcaccaactggccgggccggcaacgtacgtccggccggtgctggatccagtagctgtctgtgatgcagtagtgtcagagtgtctgcataagtgtgtctggtagtttttcttgctgggtttggattaaacattgcagctgatacacttttgtgtcaggagttttggagatatcgagatatcgagagcctcgttcggcttccaacatttcatcaaccagtttgaggcattcaaactctctctcgctctaaccacccgccgcagcagcacacgttcctgttggttggcggttcaactgtcatgaaaacttggcgatttccccggcttaactttactagtgaagccgtttcaagccgttacttaccaacgtttttatcgaagcgtgatacatgcgtgtgcgtgatcagaaaggggtccatccccgattcgaacaaccctgtggtgctgaaaagagatggggtcctttctcccctgtgggggaaggggggggaaggagcgcaagccaacgaacggcggccgagggaatcatcatcatcatcatcaaccacggcggatttagctcttccttaacgggtcccccgccgctcgctcgaacgctatcggtagactattgaacgcgacaggaaaaaacgggaaaaccggatctgtggaggggacaaaaacaaaaggggtatggggtcggagcctggggggggcgtggtggaagagggcagcagcagcacatggcagacggggataatgcctctttgcttcaaggtccaccccgacggtggggagaagtgggtgaacttgtttggttttatcaggggatggaggggggttagctttttgagcaacaggcaacggcgataaacactgccaggtaaagccgaagagagtgagagagggaaaagactgtgttctccggtggatttacggagttgggtaacataacgctacagatttggtgaaagcgcatttttttttcttttttttttcgaaagaaagcaaatcccggacgacaggaagaagaaagacaggggaacacaaacttatcttttgtaatacagcctgtctgtcagcaatgtcgagggacgtcgtattgcttgcctttgtgtgcccgtcacacaactcttgctcggacttttttttttgtttttgtttttttttggctgtttcttccttttcaagtcttacaaaataaaagagccagtatctgatatgatcggcaaaacgtccgccgttgtgtcaccaaacacgagagtcaccccctctgagatctctccacttgtgatcttgcagcggagttccttccttcccgtcgcccggccagcgacggcgcgccgttgtgtgtctctgaccgttttatcgtcaacgttcttgtccccttcctgctgccccgtgcgtgcttgcggcgccggcgccagaggatcggatgcgccatcaaataatggccacaatggcggtaataataagcctgtagcaagataatagttcatggatatcccccgaaaccaacgacatttgtttcttaatccccgccgtagcgctttgatatatcactaccgccgtaagaacgccattcggcataacaagcccggcttaatcttctggggggcatgggttgaagatgatcgatatccatgaggcacatcatcatggcgtccagaccaaaaaaacaaaaaaaacaaaaaaaacaagccattttcgaccttcggtaaagagcaaaattttggactgtctcgatgtgaacctagactttcttgggtgtcagccacattaccaccacccaagaccgaccgtcgttggggatctgctcggcagatattctttccgggtgcagatcatcgccctccctcccttgatatcgtggtatcctgctgcaaaatccagaccgcttggaagaggcaggcagagagtgagaaacaatttcgtcataaacgggcatccacccgggatgctgcgatgcaggttgagttgtcctcatcatctcccgccccggttccatatcgggaacaatatgctgtaatcgaggaggaggcttgcttgcttcggtgatgatgtcggtgtcctgaaaagaaagagatcccggtgggcggcaccgtttttgatctttcttcttctttggtcatgagtctctctgttctccacgatgtgattttgactcggaaaaataaacggtcaagagaaaaatggcccccatcacacaaaagccactaacaacgttgaaaagtgaacccctgccgctcgagatcgggcttggtatcaacgcctctttttccaaggacacaaaaaaagaaaaagaagcaaacaatgatcttgtttcctgtttcgtttctcatcaaccccatgttccagatgatatctcatgtttccttttcctcacacacaacccgccaagaaccattaaacgaagtttgatataacacactagcctcccccagcagagcggctgctgcgggatctacactgtcggtttttttggtggtacattgtggtgcacagacgccaggccgggaacatcatcgtcgatattttacaggcgagcgaggtcgccgacctggaaacctttcccgaggggggagggggggtgacaccacgcgtgcgcaggtcagtgcttttttctttctttttattttttaatttctttatgttaagcccctacccgcctgggctgctaagagacctggtttgtgttggagtggtgatgatgatgcatctccgagcttgctcggccgggtgactgctggatggctggatggatggatgtcgtcgtccagcccgcatttcttttgatatgtgtttataaaagggaagggaaatgctgcggttacattgagaatgaggagtgagagactcgaatgccggcttggtttcgcgcgcggcgggctggagatcccggcgtggtgttgtggtgcggtgatgtatgtagtatgtaccaaacaaaagtattgaatgcggcacaaccgcacaatcccagtgaggcgggaagtgataatagctgagtgttatttcttgcgctctgccctgcaaggtgagtgaggctatcgctatgccccaactcaaccaaggtcaggcggagaacgggattcggaccaagccaaggtgagaagagagtgtggagaaaaaaagggttgcagcgttacgtttcttcagcttgcaacaactcaccacttggcaatagcgcctcgccagttgcggtcggggagcggaacgtagcgcgtcgatcaatcaatcaaaatcaaaaacgatggcacccgactgtttggctcagacgctgtgccccaagcaacccttacactagcgtcacttttctccaatcaaatcttccgtttttttactactttctctctctccgtttattcaactaaccgatacgccgcacgacacacacacacacacacacacacgcacacaacaaacttacaaggatcacgacgatctcccttttcttttctgtcccccttgtattcttgcgctttgttgttgcaaggccgccgccctgtaagattgacaacaacggtggagaaaagctatacctatactggcaatttttgcggatgatacgttgggttgggaattacccagggttagttataactctaataccttttggttgaatgtcttggcatttttctttcacgacttccccaaaaaaaacaatttctccatattgcggaagaaaatgattatcgatcgggacagcttcggtctgaacagacagatcgggggaaaagcgacgatcatttccaattcctcttccattttggggggggggggggccttcttcaatatccacagcgtgtacaacggccttggtttatgaatggatcgagtcaacaaaaccaagtccggggtagggtacctacctagacaggttgtatacgccgcggaggaggcatgaatgacagctttgcctttctattacatacatacacctttccaaaaccccacgaagctactgcgaggtactgtacctgaataataaaaaatcccgttccaacggctcctcgtgatgcatgatcttgaagcagtttgctagttagcgtgtccaccagctgcccaacggtttgtggattacctcccttcaagtccttgtttctcatcatcaagcatcgtcattgatcggtttggtttggaaaaccgccccagaatccttcgtggctctctccagatcgaccattggactccaagcgtcaacaccgatcaacaatgcagaaacgtcttcacgatcgggccgttgtgggatgaaccaccccccctaaaccaaagctgtgcaaagtgatcagcaagatggctgttaaactccacaaatcctctccagctcgtgtcaggcctctttgtcagatcggataggtccaacaactggccgccgttcattttaggggagctaaggaacgaagccttccagccgccgttgaacttagctatccggccgagttctttcttctctcatcatcaatgacgaaattggtttccttcttgttgacagtgatgatgatgatgattgtgatcttcccatcttgcacatctcaatcctcccctaacctatctccggcgctattcacaattcacaacaacctgccctatgtagaccaccaaaaagataccccccagtcccggtctccatctgggcctaggtccttgagatggtatgaccgggaacgtacggaggaataaaaaaaatagggctagtctaatgtctgttcaccgtttttgtccctttcccctgctgtttccaggggatgttggtggcagtggcggcccaagtctctgcctgcctgttgtccacccaatcccttctgggataattgaacaaacccaaaaccagtagcagcgcaatgtggagatctgggcttgcttgcctgtcggtcaccagccaagcttgtaaaccctcaacggccagtgattacccgcccacttccaaggtaaaaaaaaaaacatcatcaccgaaaccagccgaacaagtaaaaatgtatgtgcaaatcccctcaccaacttcgcccagagggctcagcggtatcgtcatatgtattaagactctctcgctcgctctccttgcagccagagccacatcgtcagtcggtaattattatacatggtaatccacatcgctttttcctttccttcgtgcgctcatgtcatccgacctccctgacagaaagtcgttccccccaccacccatcaaatcaatagtgtatatgcatgttatccaagaatgaacccttgcagaccaaagcaagaagaaaaaaatgtacaaagtaaaaatgaaaataacaaaggaaaagaataatgtaaaacaagggaccaattcgtatggacggggtatcatcagtataaacacaggtttgtcgacaaaggaaaagaaaaagaaaaagattaaaaacccaggggaagaaagccattcgctatgcaaaaccttgcaagtcccgtcttttgttttggtttgcccctcatccaaagtcgtgtttttttttgttggtgttattgttcaagagtcttgttcgttggtctgggactcgcaggtggagcatccccgaactaagggagggatgggtcaaccaggttggagactgaaagtctgttgactctttcctcaactctgctgacggcgctcagtccggggtcgctcagcttgaaagtggaagccggggcgttgggagagcttggggcagtaagagggtggtggtgctggcggccggtggagtagtcattggtctggggagcaggagcgccataggcaagaggctgcctggggtagtcgctgcgggggaagacgggagacatgttgagtctgaagtctggggagtggattgggtgagcggcgtcggtgagagatggcagcttgttgctgttgttgctgttgtccgcggcagaggcagaggtctggtaagagtacactccatcctcgggggctgtcttgagaggagcaagcatggtactctcgggcctcgagtcgtagtagcgctgcggtggggatggcgcctggggtgaggctccgtagtgggatccgttgtccgacatcagagagggggccgcctccgagtcgggagagtagacgggggaagggatgggagtctcgagcccgtactgggcatcgtgcatggaggatgggtgaagaggcggcaccggaggtagaggtctctgggaagccatgccgtgggcctggcgaaggggaaggggccgcgaagggaggggggccatgggcgacatgagcggagatacctcgcggccgtgatactggagcgaggtggtggtcattgtggccttgcgcttgtcctgtctctttctgcggttctggctcccgttccaccagttctttacagcgttgtcgctgcggccgtggagacgtctggcaatgtcggcccaccgcttgccaatttgctggaccatggtctcaatgatgacgccttcctcgggcgtgatggggtcgtggttgagagtaggcttcaagttctggtgatatctttcgcggcactgctttggtgttctggagccgagggcattggagatgcgtacccagttcaaggggccctggtgctggaccaaagacatgaggtaggcgtcctcatgggcagaccaagggcctcttctgtggttgttagatggggcagtcatgatgtggttgttggtgtagtgagacagagcagccgaagcacaagggtgagcggtgctattgtcggggtggtagtaaagcatgtagaagtctggagagtggagtttgatgggtggtgatgttggtggtgatgttgatgatgaagttgtctgatggtggatgaagctgtacaatggttcgacgaggaaggaggaggaggaggaggtctgataagtatcattcccagagtgtgagcacagagacccaagagggaacaacaagcgaactggcaagcaggccacggcttggctctggatggtacttgggaccgggtctgtcacttgtggggacacttgtgggtgctgctaaaccaggtggaggagggaacttcggtgcagggacatgggtaccaccagcaagcctcaagaaacgggggcaggggcagttggggggggagccgtccacaaacaggcccccgtctcctgcacccctgttcccgggcccagctctgggcgggctgcttgctgctggagcagagcagagcagcaaaaacaggacagcgctcatcagcgccagcacacgacacgacgaaacgatgaaacgactccatctgtaaggtacctgcctacacttgtcgtcttcccgcttgagctacgacagagcctggcgccacaacaaggttgagaaatatccgtacccgttcatcagtgacgtgtggaatctccaacgtccctcatttgatgtcaatgggggtgtggcgccgcctgcctcgttgagctgtcgacggcgtgtatactctaaaaccttcacagtgctggcgagagctgtggaggaaagacaggtaactcggggggtgggggtgaggccagatgtactttccagaggtacctcctggccgtcccgaattgagttcggtacgtccgagtttccagatattctggcggttggctagccgcaaatggcagcggcaagggtatcggagagtttaattgatgcggttttgatgtggcttgagaggtacgtacctccaccatcgccatcgcgccttcgacgccgacatggacagcagcatcggcagtgactccagcaagaaaagaaggttcaggggattccgcaagtgtgcagtgtgcagtgtcaggcgagcaattttgcctggagcaccatgtgctgcagtgcagtccccgtcgccgtcgattttgatgcgttggatgcggtgatggaaaagacagcataacggtatagatgattcttgtattgcggcgtcgcagccgtgggattattattgggatcccggtctcttaaccgtaccttattattaccgtattactggacgctgtgtacgctgtgtatcgtccgtcaccgcggggagcaaggatggcacagggatctcatctcagctgccccgtgccggccttgtctgctttgatgatcgctggcaggggcctgttcgcaaccaacaccaccacttcactcacacatcaatcacatcacacacttttttgcatcacggaccacctcttgtcactctcactctcactctcactctcacccacactcacacctcaccgtcgatgagaatcctccgatccacagatgatgactgccccctctgcccctcctagtggatatggatccagactccttatactcaaagcttgccgagtagtcgtgttgcaaagtgcgccgatttgccttcccctctggctgatagctctgagtggtttttgttaggacggcgccgtccccttgctggcagcacatcatttcacctgacaagtgagaagcttcttcctcgaggtcgatcttcctcagcgggcgcaacgccgttcgaaatggtaactaacgtctgaatcaggacctgcacctacctgactacagggagacaatacatgaccctaggtccagtggcttgcaggaaatggcttgtcccatctgtaggggattttcaagtctgttggggggtaggtagtgtagaggttgccgtcttcggcaatccccaagatttgccagtcccgttccaccaagctgaacccatccacaccatttttctcttaagacatatattatggcccgggggttcttggagcagagggcttccaaaaccactctcgcgcgacgcaatacagtatcatcgcggctcgcattaggtatcatgtagcagggccgctattgtgcagtgtcggttgagccaatccgcccctcctttttgatgatcctcgtggagtcggcatgggatgaactcgcatacggccgtcccgtttctggttctttcttggggggtccctcgttccagaaggaacgaaaaaggcctcaagatgcagacagagcacaccacacctttcacaggcgcgcgcatccagtaccggaccgcattcttgcagtgtacgagacctagaagttggtgtagccacacagggctgacactcgatccggagatggcgggcgcctccacgcgggcatcttcggggggtaggctctggaaggcggcgagaaccatcagcagccgggggatggcatggcaagatcgtgatgttcttttgccccccctggtttccatatctggacagagagccccatgatgctcgtaaatctctccaccgcaataaccagttcagattgttgttcctgcagagagaacccaatcagtgctgatacgtgtcattcctcaacggctgagatggcggtgacaacgtgatcaaacactcgagacagcgaaaaagaaacaactgtcgagcaaatgggattgctgggtagcatccctcgtcagcccatgacggcctcgtcccaagctgctggggcgcgccagtggctagctcccatgattagccaacccggtgaaccagatcgtcggactcctcaggtgcgcaataattcccgttggaattatttgagggctgatatgatatagggccagcatgtagcaaatatgggcgaggggtcctatctgttgtgagcgccagtgggtggtattcttttcgcttactgattcagaaagacgcccctgaagcttgatatccaagggaggggctcttcgctaaaaaggggtgaaaacggcaagtcggtcgccagtcgatggtactgttgctgtcaaatggtagcggccgagatctggggttaagcttcaaatcccagcgagccggtctgtgctgatcctgagcgggtggcttttcttcagcgacccatccacttgggtacccgaccggctaaatgcattggaagggggtaggggtgcatggactttgcaacggcgcttagtgtagctttctgctctatcctccaacgtagcctcgtagcctctcggcgctggtttgaacctcgttcctgacgttacatccagcaatcagacggcagcgaccgcggcactctcccgagcagtcttcttctgacccagacgggaaaccagatcgccgcgactccagcccacccaccacattcgagcagtctttgggaccagtactggaggagggatggcacggaccggcgatcgtcagttgctcgagatctgccctgacaacccaccctccgttatcgaatcacctcgcacaacatcaggaggaacggcgatggcggtgatatgatatgcagatcccgaggggaatgtcgattatctgcgcaaataataagttgttggtctggcaagtctctggaagtatgtttggcagagcctctctggttgtccatgtttcacctttctgattcggataagcagagcgacgacacctcgtttatcacataccgcaagcgaaccgaacccactggcagtccccaatcccgtaccacaccacaccacaaggtgtcttccacaccgctataattaaatcttaggggtataacggctgccagttatagctctgggcgcgggggttgtacatggaatgatactattcacacacaaccctcacacaagcgacaccaggctatgtatgtacgattataggagaatatcatccgtgcagcacattagcacctttcccgccaacctgggaacgaaccatgatgcgatgcgaggacaccccgaaggcccgaacgacaaacttccgaagatttgcgcgccggtagcaccagaaaaccctttgaactgcaaaccaatatgctgtgacgctgtcacagctgccgctgctgctgctgccgtcgtcttcataggcaagtaacagcctctgatgatctgatctgatatcagtacagtactgtactgtctgtaaaacccaaccgttcgggtaggcgtgcgggtgaaacggacccgaagcaacttcccgcatgtttgaacgtctccgcttcgtcaagctctcgctgcaactacaaagttcctcctcgcgacgtcagaatagacagcgcagcaatccgccaagattggacagatcgtccttgcaaatctctcgggtggtcagctgggtggttcaacgggggcccttgctaccgtggtatcgtatctctgtctccctcagacacagacacacacacgatgcaaaaaccgccaagcacgccaagacacctatccctgccccctcttctcgtttggtatccaccgatgttgcgatactccagacacagaccttggtttcgtataccaacgaggctcccagatcgtggggagaggggtcaaatatcttggacctctgtacgagcggtggacttgtcatttttccttgttgctggcttgcatgatcttcccgtgcgtagtgtagcaacctcgcaattactcgctatcttattcgccagcaaggtggaatacagtcatctcacacacactgagcgatgttcccaagagcctttttctttccaccttgataccacaagcagcagggaaaataatacccttgtcttgcggtatccgcgctcccgaggggtctttttatttcacaacggcatgcaagcagccggtattgcttacagagatccagccggtagccccaccgccgtcaccatcaccgttcagatgatatgtagatacgtaccccatccttcaccctctcttcaccagccacacccgccacacgccccatcccctcgggctcctagccgcctccagctggaagataaggctcacctccccgttggctggaggggaaagaagaggagggtcaaccgacgaaccgggcccccggatgtctggcagcgcctcgaaatccgaatgcccacctcctcctcatgatcatcccctccctccccccgtagctgcaagtctgtcccagcggctcgggcaccaccctactccgcaatgtggctaaagcccgactcggcgaccttttatttatttttttcttcagggggggggaagcaagcgatccgtcctagcgttgacgcaaaagagtaacgcaaaaaaccgttgtcacacagcgtcgggtccaatcatgtcggagggatcttcaaggtggcgtttctcttgtcttttggttgcccagggggcccctggtgagggggactaactggtattggtaattgctagcgaacggttcagctgaggctttgcgacgccattttgtaggatggacttgccgttttggatgggagcatggagagatggattggtgattgttgttgggggggagtggatagctatggatatggatatgaggggcggggggggggtttgttttgtggtatgtttgaggtttgtgtgtctttttgggagtattttgtttgtgtttgttatattttcttaggtgggtgagagagaggagtgaaatgctgatatgtttcaccccttttggacgacactgtaactcctctttctctttttcgttcgacatcatcatcatcatcaccacccaccagcaccacttaaaacctctccagagttctatgcttcagcaagcgttgcgcgcgcaacattgggacgtcaaatctctcaataattcggatatcctcccggccgacgttccaaaaccctattattcccaggttaataaacgggacgggatgtttacctacctacctatatggtgcactactattcatgtacggaacatcccctcagacagttattccctttctacggatgtaacactgcacgttggatatgtatgtattctcgaaatagtagcgggaagaaaataagtggacaaaatccccctccccccgaccccagggttcaatagtacaaaccccggcaccaagtttctctcttgtccttcccgctaccacctgcatttacaagaggttggttgagcctcggtatgtggatataggtaccgtatgtactgtaacttatacccccagctattttattcaacgtcatattgaacggcaaacacggctggggatgactagcagtaaaaatgtccagcctggaatgtgaaaatgcaaagcaagttgaaatgcagattggcaaaaatgcaacgggaacaatgattaccagccagtcgatcgggggtttgtcgagctggacaggggtgtcaaacccgccgccgcatctacaagcagtgacgaaagcgttcacatcaccgattctgctgtccgtctgtctcttcctgcaaagaatttcttcgttttactgccttgttgggatgtgacaaaaaaaaagtctgaatctgccgagttgggttggtcagttaaaccatgaactcgggcatgcggaacagagactgagatacccacctaccttacctattccaagtcaacaacggcttcccaccgttttcttttgtctcttcatgatgtatatacaacaactcggggaaagccaaggcatgatatgcctgtcttgacccagataacctcccttctcttgtctcgatccttttcaaacgcccgccgttggggaaagaaaagcaagtgagacaggaaagaactggtagtctccttcctattggtagctgctcctattattcaccgacaaacacacaacacctgggtacatccccgcttcgagaacccaaaaaaaacaagctccgagacatttttttctctctctgtgtgtgtgttgtgttccaaagtggcttgagaggtcaacggtcgtcggtaaaagagacaccgaggagaaggacaggaaaaaagccaaaagtctcacgaagaggatctcgcttgttgtattctgtaccacatgtgggtggtggtgagacaaaaaaaaacggtggtgggcttttcggttttctgaggctcgcaaaaaagctaaagcccgaggccgggggagacctgttgaggaaatacccccccatggccaggctacggctgaactcgagagctgtgggtggtagtccaattccagctgtcccaagttctcagctggacggactgttacaatacttgtattccctctgtcattctcctcggaaaacgatgaaaaaactgcccgtgttctttcccaaacaagatcatgtgtgttgacgaaaaagcaggatttgttctcttctagcccagcaaaccggcagggctgtcacctattttggacatcctctcctctgacgtggctcccgcaaccaccatatcttaatctattccagcggcagcgcttcgctttcgtgtttgatcccctgccgggcgggctactggtcaccgggaacggtcaacaagacctgaaaggacatcgatttcctaaccacccacctcttcctcccccccaaaacccctttccgagaagaggggtgccggatcccaaagcgggacatcatcctgcttcctgcatgctctcttcctgcctcatttgatgaaataaataatggggtcttatttggagatattatcttggcctgcttcccctgaggccaggctgggccgcagctggagcttgatggcggaatatcgtctatcaagtgcacttttgccacccacactcgcatctggtgaagctcgcgtaggcaggttaggtctgggagtgagacagttgacgacaatgagcattgtttgaatgcaagagtgagcatatccggaatgttaggcgtcatcgacacccgcggtctgagattcaagtacgtaccgtgctctcggaaccgttatgagacacataaagcttgagtagatgttgagcgggtgaccggtctattgataggcagacacaaaattccgagaagcgataggatgatgggatatcgtgatcatgtatacggcgaagtaagggatagaagggcatccatagtcgccagcagcatgtcatggccggtactgcagccgagaaaaggtggaatggccggcgatacgcttccagctttcattgacaaatcatcctgactgcatctaagagtatgcaggttgtgggctcggttagcgagcacgacaagcaaacagttctcgttttctcttcgcccaggttactcacctcttgtccttcatcgacccagtaaagtccgcatattagacccagagacagaaagaacgccgtggcgtctcgatcgacccaggccattccagtcccagctgtagaataacggcgtaaaacggtaagctagcccccagtcccccctttcgcgcccgctggcctcgttctggacctcgactaccacctgaattgccggacaggccgggcttccggggaagtagggaggaggttcttgtccaacacaccatccgcaaaggccgacactgcaacggttgagtccggcaagcaaaaacaaactggaacttgggaacttttgattcagaatatgccagaggattgagtatgtactacacatccattctgacaattctcgtcaacccgagtggccggatcgacgaagaggaggagtcgacgagcctgtttcccctctgggctttctagtctcggttggacattccttatctgatcagtcttgctgggtagtacttctcctcgggaaaaggggaggtaaaggctatgtgtgagtacaaagcgatgcgtaccagagaatccaggtcgaaggcggtctcaagtgtccaacactcggggcctatgcaaacaacacgttcgaagagtgctgatgctgtcctactcctgggatgctcaccttcctagatgtactctgagttgtacattgccttggtggcaatttactagccctcaaacgtgagggacaagaccgctattggcctactgctggatgtttgttcgtctctttcctattccaggcggagtttatgtccacgaatcaagtgcagaacacgaggggattctgtcgctgtcagcaaggagcatgataatcagaagttgaagatgtgtaaagagacgcaacatgaagaaggcgtgattgtagaatgcggtagcaacgaggaagcttgcacccgcgcacttcttcgcccttaatggaagtgagaaccactccaatctttgttctacgacgacaccacatcagcccgccaccatatcaagattcaccaccttgcagtgagttgtgccgttgcgcccgatgagccgctgtcgtttgtgcagcaacggcatgagcaccgcgttggcaccagctgccatgcgaatactgaagtcaagatctccactcaatcgccgcggtactgaaggacacttgggagatagtgtacaccgccaggcttgggatgagagagactggaaggtatcggtatcacgccaggacagagaaatgactcaaaatcctacccataaggcacctcctgccgactctacggacggcagatgatacctgacattcttgtctctcggatcatgacgccggttccgcggtctgagcttgagaaaggtgcaagtatccgaagaagccttgctgtcgttgcatgatatggatactagggaccaattacatggcgctggccgaatggaaaacgacctttcaaaacggtgggatatcgctatattggtgagcagtgataaggtagtctggtgtaatcgcttacaaacgctgatgggggagtatttatggcgttgtgctgatgtttagtggtctgtaataagatgaataggggtgaagttcacaaaagtggattggttggctgtcgttgctcgagcaagtttggttgcactttgctgcttcagctgtgttgggtaaatcgattgtcgagactgtcccaaaagggcagtatgccgaacgtcttaatagcttcgtggcagctgagaattgaggacggcgcgattttgtggccatgagttggtgatgggttgagtgtcgattgctgatgatcgtggtagatgaagggaagggaggccactgatggatgggccggtgctgatcgcggcaaggcttcagagaacctcgacaaactggaagattgcaaaaaagagagctgcgaggtaggatgtgaaagcaagacgagaggtacttttcggagatgttggggtgtgctgtgtccaggttcccgacctcaatgttacagcctggagaccctacggagagaggtcaaggaaaggaaaggcatcgacacgggatcgctcttgctttcttgctctgaagctacctcactccttccagcaaacttctcattgcctggaaagtgaggcctacaacgcaccttcctgtgcatccgcctagcttctctcaagtgacggaaggagcgttcatcaatggatgaaaatgccttggcaccttccgctgaggcagcctcgctccttcccatgcttgatggcatcgccggcacacctggaagtgaggccttggacccaccttccctcttgaatgttagggccttgggataatttcagatttatatctttagagaatctcagcacctcatctatcactgttgccatttagtgtgcaatgctcaactggaccaaatgaccctgcattcttgccaggtcatgtaaaaagagatgtaactgggagatggtggtcaaaaccatagaggtccagtcagctcgagatttgatgtctgtcaagacaaggcgaaaagaacagacgctgtcaacgcttatccctgagaaaatcaaacgctgtgtggcgggccaggagtcgaacctgggtcttcgctctaactcgggagtgtaataaccgctatactaccacgccacggaaacgctttttggaaattggaaccatatactggggctgggttgagtcttgcgaagtgggttttaggttctgttggtgtggaaaatggggcgtggtggcgtcgagatatccgggtcattgtaaaccttagattggtatgctccgaagagccactcagccgccatgatcttgaagaatttaaagcagtctcttcttcactgaccacaagactagagaagatgacgaattaatgtaaaactgagctctgtgtgagtgagatatcttcgtagggcatggggtaatggcaggatatctctgtgtttcaacatccgtctgtctttccttcatgctcgacatctcactgtcatggaccgcgctcttgctcttttttcacagttaattagttattactctcggtatactagttcttcgactctatttgcctaatcatctatcgtcaatctacctctttcccttttgcagaactccattactcctgatcccataatcagaaaccataacctcacccatcactcctgaatcatcacaaccacatagtacacactcaatacatcttcatccggcctccactctcataccatcttcatccggcctccaacctcatccaatcctaacccattcctccaacatcatcccatctttcacaccatacatagccctccctcccacctcataaccccaaacatttattcacataagtcataaccatcatcataacacccccccccccccccccaaaaaaaaaacattgcatcttactcaccacttacccccatcccaaaccccttcccctcccaagtctccctcgtactaaccccccccctcaccccaaacctctcccccccaaacccaaaccttgccaaccccttcctacactgccaccgaacccaatactcccaatccagccccgcaaccctaggcaccatcccgctcccaaacaacccattctccaccaccagcaagctctccaccgaatccaacaccagcgcccccctcgagctcatgaacccccccgcgttctgcccagccaggcagacatgcctcacaagcctcatatccggcgtcagcctgatcaaattcttcccagaggttgacgacatgacctcattcgacaaaccaatgacgtcggtcaaaagatcaacgtagatcctcggctgggggtgtccacgtggagcaagtccgagacgatacctcttgagcgcggcaagccgcgattcggagcagacagacagtagtaccgggggaggggtgctgcaggtgaagatgttggatttggaagaggggtaggaggacgaggtggtggcgaaggggtatttctccccttcacgagacgaaaaagatctacccctggcgagacgagtggtggtggtggtggtgtctcttcttggacgggatgaaaacttgtgcagccaatcgcctgtgaggttggagatgtgattgttttgcttggggagctggaggagcatgatgcgtgatttggggagcgcttcggcccagatttgctgtctgagttcggcggggaggaggcggaatttgggaaaggttgttggggatcctctgggtagggggcggatgagggaggaggagtggattgggataagggaagaggaggggtggtttgggttgagggtccagaggcggcgctcttcagagtgttcttggcaggcttcttgacataaccgggcgtaggaccggattcgctcgctgaaccagccgcagaggatggatactttgaggaagagtcggatccagtagcagtcggagctgctgctggtgttgtccagcatggaggggtcccgctgctcggggagggtggtggtggtggtgatgattgtggtgctggaggggtcaaaggtgggtgtccaggaggagagggtggcgaggccgtagagggggtccagcattttggcgggtagtggtgttgttgtggttgttacgagcggaagatcaccaaggggggtgatcgataccgcggaggggaccgtagtcgataccgggcagagactcagcctgtaggacgatgaggacaagagtacagatgagcacgatgatgacaaaatttgtgctgtttcttggccaaggtggtggtctatcatatacccggaaagtaatcagtccgcaccatggtcgaatgtctgtcagtaccagcttgacaagcacggctgccccttttgtaattcctgcgaaacctccgctcgtgggagcagggagtccaaagctatttccttgcgctgtgatagtcagtgcccatgcaggtgaactccatcaaccacgtggatggccgccgctatcgtgtgctactgtactccagaatctggagaagatggtttctttgctcgttcacagtttcaaaagctgggtagaggcgcgctagagggatcaaacaggcgccgttgaaggaccattgggtctgggccgagtgatgcataaggtttgatggcacgagcggacgtcttgaggcaggctgggaaagctagagagagaattgggtgtactgtatgtgagtacctcggccgtgatatcttgtcggacatcgggagattgcctgattccgacatagaagaaggggcatcgccggaaatctggcagattgcttgcgtaggcagtgctcgagtgtggcccaagtgtatatcgcacgaccctaatgcgagtgctggtgaatccaagggcctggttggactaagtatgcaaaccccaaacccagacctagcacatctcgatctcgaagagatacttgttcgatttccctgagctgcttgttgcgaggtctgtcgaggcatccataaagacttttggacctcgagttgcaccaaagcagagagctgggcgaagtgctcatttgagttattgactttctgatatctggcttgaaaagttcaacatactgatgatcaagaatctcttccactcagagtcctagtttgccatctgcgaaatcgaagattttcttaagggcagccccacgacattgcctgtgtgttataatccaccgaagcacatcaggaaaagttacacaaagaccgaaagctgcattggcttgggaagctgcagctgttccttgcattcgcatgtatgcaagggcttctgataaaacttcattgcattcctctctctctcgtgtgactgctactacatctcatccaccacgcgatgttgattcgggaacatttagggcggcatgaatgaggaaacgttgtttctcgaatgccgacagcgagtcctcggtggtaatgttggatatcatggcttgctcgtgagctttcggtaaagagcccaatcctttggataagatcgaggtgtggtgtggtgatatgctgtggcataatctcagacctcaccacacgtcggttgggtcaacctcatgcttctccccatcagccctgatgtgctctttcttgacatctctcttcaatggttttcgcatatcgtaggcatcctcgctgtcctgagtggggtcggttgaatggtcgccatagtactccttgaccaccctgaaaatactgtagcccatgctttcatagaatttgatggccttgcagtttgtcttgcgcacaaacaagtcgacgaaccaggcgtttccggcatcaccagcggcctcgagctgctctgtgaggagcttgccaataccaagtcggcgagcctcaggggccacggtgacggctgtgatgtgggcgtgccaaggaagataatgctctgagaatttgtagacgtcaggagacgactcgagctttcccattactaagcattttttcagtatcaagtcagattcaaactgtgtacgcggtccaactcactgtatccgataatgtttccattctcgtcttcagcaacctggaagagtgatggccattttgcgtaatactgaagatagaaggacagttcatatgtctctgtgagaggatccaggttgcattttgatagcttgttcaggtcatcaggcctgaaccggcgaaagttggccatgactgtcgaggtttgtgaaatttgagcttcgatagatggtggggagctttgatgttgaaggcgtcaaagttgacaatagctgggcagtttacaatccaacgttcagtgacctactaacagtattctgcgtgacttacctggaactctgttaggccagctgaacgcccaaaggggaaaataacgacttttgattggctgttggggctgtcctgcagcatcccgtaacacccgcacgcactgtggcacaagcccctagcgacgtcttgtcaggtacctacctcgcctgagtcaaaggagagactgatgaaacttaagcttggctgctgctatcatcgacttcatttcaagcactttggtttctgatatcgcaattgttaccgcttcagcatccagggtatccctcctgcacccacaaaaaaatgcccaagcaaaaaccaatgccggagcccgtttcttgctagagatagagtaccttggttcttaacactcacaccgctgatatcaggctcaccaagatagcgattacgtaccggtctcggaccaccgacatcctacaatcccacgaacccccggcacccttcccctcgtcagcactcggccgacggcagacagaaccaaaatttatgcgacctttctgagaagcagatttggacgtgaagcagctacgaggagttcatgcgaagctcctctcatcagctgtcccttgacaaaacgccgaacacctgacctccataggtattaagcactactttttgcccaacgacgagtccaccgaacaccctactgggcccgcacgaccccaactatagaccacgcattttgatatagcctcctttgtgtcatcctcccggcttttccttccagcagtcggaccgcgccctttgaggccttcttcctgtcactgttgagcccccccctttccgacttcctcgtctcgccaccctggctgcggggccaagccctcgctcgccacgtctgccagcccccgccccagaccgacattacgatcagcttcaccctgctcggtcataaccgcaactccagactcccaaagcgcgcaatctcgcgcgcagatagtcttccaaaatggcgtcgtacacaccgcgccattcccggcatccatctctcgatctcagccaaaccacttcgtactctccctcccgcgagcgccgccagtccaaagcctcctccttcgccgaccgccccgggacacccctccgcaacggtttcgcctcgtctgatatggatttgggaatgatgaacggtgatggcggcggcaacggccttggcaacctggccgacgagttggccgggcttgacgatgactacgatgactatgacgactacgatgaggatgtcccggagggagagtacgacgacgacaacgagctacagaaaagccagataaccacccgcggaaacagtccacacaaaacaccgggaactaatttcgaggatacggatgacacagacctggaccagaaaggtggccagcaggtgcgggatagcggtgtcgatgtagagcacagcccatcacgaggaagcagtctcccacacaggttgaggaataacagtctgggcgtaccctcgcccagtgggaagcacgggcacaggagaaaaggcagcgcatatgacggcagtgaatatggcagcgagagcgacctcgacaatggcgggatgccaccacgcttaatagagaaaatggatgaggtggaaagtctggcgagacgggggacagagaagacgggagggccgttggatgggacatttcagagggttactgaagggctgcgggatttgggcagtcaagcgggtgtggagggtggtgccactaggtattttcttcccaatcatcctccgacctggatattttcaaacgctaacaatgctctttttcaccaggttaataaccgcccactcggccgtgacaactcacctgagccatcaaaacagacaaatgcacaacctctccttcccgctcttgtcgcccctggtagcaccaccagatccggaggctatcgaagagctgttgccgatgctcatcagtctttcggaactcatgccccggccttcgacaaccgctctccagtcattatcctcgcttcacagcctgacgacggatctggtgaatacgctcaactatctgagcgacacgattcacatgtcaaggcaaaccaccaatattgccacaagaaggttaaagtcggcaaaagatctcgtggcggagatcaagcatgatgaggagctgagagaggaaggggagaggtggctagcaaaggggaagtggggtgagagattagagcgaagggaatgtgcgaatgtgtgtggtgaagtagtgggcgggtttgagaaggtatgtgaaggctggagggagaggctggtggagttggccagagcagaagagatgggccaagcttaaatttgaggcaagattctgacatgtctgcggtgttgttgtgtttgtttgagggaagacatttcgcgagagagggaggggagggttggtttggattttatgcatatattggtttggttgggttttggtttggctgggtgggtgggtaggttggttggttggttggttcatggcggcaagtacttagacagatatcggattcccacaagtggacattacatacttatatatacaggagacaaaaacgtatttacgtaccctttttgctacggggtctttctctccaaagtcgatgttagacccgtgaaaccatgacgggagaattcttttgttcgagaacaactattccaagcacatccaacctcgtacacaaggatccaatgttttttctcgtaccaaaatgggtatcatcatctttcctttttccctaaatcaacccagcttttctaacccagcccttcttctcgagttgccgcactacaacatcccttccccctcaaacaacccagcaaggctctccccaaagtgcaccctcctaaccgcctccccaaacacgctgctcacatccagcacctcaaccttgccacacctcctcaaatgcgccgtctggtcaaccgtgttggtcaccaccaccttgtcgagggcgctactctcgatccgctccagcgcatcccccgagaaaaccccatgcgtaaccacagccaccaccctctcggccccctcccgtttcaacagcttggccgctctggtgatggtattccccgtgtcaaccaaatcatcaatcaacaagcacgtccgtccttttacctcccccacaagcatcatcgtcgctttggcgctattcttcccgggaatgaacttggggtgtcgcctctctttgtggatcagggcgaatgggaggttcaacacgtctgcgatggcggtggcacgctttgccccgcctgcgtcgggggagatgattgttacggaattggtggtggggaggatgtgttgggagatgtatttgcacaaaaaggggcgggcgtggaggttgtcgacggggatgtcgaagaagccttggtaggtttgctcgtggaggtcgcaggttaagatgcggtctgcgcctgagcaggttaggaggtcggcgaccagggagccggattgggccatccattgtttgtagtttggtttgggggggtggagggagagcatgagggaggggttttcgtagtcgtgggttgtaaattgccccgggggaggtggtgggaaggtgttgttgttgttgttgttgttgttgcctgttccgtaggtgatgagttgtaaaggggggccctggattccggagggggcgccgcctcggtatcccactcctccggtgttgttattgctgttggttactcgaccgacgacatcggtcatgtctaaccctttgctgcccaaccctgctgtgcgagctatatttgggtggggggtgacggggacgctttcaaaggtgtacgctcctgctttcccagatcccgcttttccctcgccgtctaccaccattcctttatccccacgaagcggtgcccctgccttggagaaagccaggtcgggctgtcgactgtatggaaacagtggcaacacagctgttaccctcattgcgctcccgcctttgcacgccgcgatcatgatgcagacttccatgaggtagtcattgactttgtagtttggatcctcccccacgccaaacgattggatgatgtagacgtctttccctcggacggagtcttggatttcgcagcgggactcgccagaggagaacttgcagaggatgcgctcggagggggagatggagaggtagttgcagatggagagggcgagggaggggtgggagttgcctgagaggatggagatgttgcggaccatgttggaggaggttttccgtgtcatgtaagaaggtaggtagtgttgttggttctggaggtgagaaagggcgatgatgggagctagctcatttctttgtcaaggtgaagctcaaacacggcggcggcgacgatgtcaggggttgatatgtggtgtaaagtgtgatctgacaattgggcacccacgacaacaccctcttcttccgcttgttggtattgtcccttcctcacaccgaatactgtagctttgtgtcctttggggtagaacaatctgcttggcaggaacctgatgttccgttcgttgctgcggtggttatcgtcaaagggtacaggtaggtggtcgaatataaagggtccaaaagatcccgtcctgtgccgtcttgtcaatgtcgtacaaacaccaccacggatatgtccccccggaagatataaaactgtgaccgtgacacaaaaactgcttgtcaattcgtcggtcgtgtgaccggaatggggattcgtcctctgcatataactgtctagcagcccaaaaaccaccgtccaatgttctttaaagaatttaacccgcgtctggccgaatgtccttctctctcttatggatggaattgtcgatagcggaatccggcacattctgtagctctcccgctgcgagattcccgagccgtagatcttatatatatccatctacctatctgacccctcttacatactactatcttcttcagttttccccaaaaacttgaaaccaaacctttccatccacactcaccgaagaattatcccatcccatcccagtagctatccaaaattcccttatccgccgcctcccacccagtgacgtcataccagcccttccgcaatcagacagctcctagacacaagaggtcccaacaccaatgaatggctgcgacagccacacgtgtatctgacctcacgaacctttccaaagagatagacaacaatagtgacagtgtccccggattaaacaaatggtctcgtgatcaacttgtcgaaaacagcaacaagtgacacatcaaaatgctgtgacacccccgcgcctgtcttgaaaagagaggcatcacgcgacccatgttttggtattccttcaatttgctaacgaggttggcgatgatcactcgtgtgctcgattcaatggacagaaaccattggcacgtgttgacagtattcaaagcgactttcaatcaccgaaaacaacatctcatgagggcagcagaattgcagacctatccaccattttaaatcatcaaatatcaagcgatcaaacaaaccgcccaagactcctcctctctcaaaccacaaccttctctcaaaccacaaccttctcccaaaccataaccttctcccaaaacatttcttccccatcccacagcctctcagaccatgaaaacagtgaaaaaattggtagcgtctctttgagtagcgtgtcatccttagtgcaggggccatgctaatcttctctgtatcgtttcaaattgaccaaatgccccgaagggcgaggaaggaaaagaagaaaccgatcaaattctggcaggcaagtcaacaatttataggctgccagaaggcatcccgggtggcctgtgcacgcttgcaaatcccccactgaatgcaaatcgtctgtgcgtcaccaccgccactacgaagatcaggacagcgtggctggtgagcagccggattgttgccacttgccacctcctttttgactcatcaggaggaacggccttcaaacaacatacacagtgacacctcaaagtacaaacacatatgcaaagtctgacaagaaagttgggacaaaatctattgtcttatcaaagagttcatctataaccgatcaaaacgaagcgaaaagcaatgtcaaaatcaacccccttttgttatcattgttcttcctctctgaacgcagcgctgttgtggtaggctgcaagcagccaacaaaaaaagtgaaaatccaccctcttgatgaaaaaatctcaatcccattactcaactatctcgtaacttccaagttacaagtccaaaagagccttggcaccgggctcactgcacacgtagatgacgtcgtgctcgttggaaaagccgttgaaagtggtggcggagcatttggtgtaggcacccatgtcctcaaagtagagccagtcaccaacgtccaggacaacagggaagcggatgctctcggtgatgcgatcgatgccgtcgcaggtcgggccccagatgctgtactccactccgctgcggtcgtccataccgttggcggcgggggtgtcatacagagtctggccgccggcgcggagcaccttggcctcggggtgctggtgatcaaacatgatgctgctgaagttgccatacagaccatcgttgacatatagcatgtagctggggtcgggagtcgtggtgccgttgttaatcaaggcggtgtcctggatggtgcggcgggcaatgacgttgcaggccaaagtgtaggcagccgaggcgtagaaacggccgggctcagcaatcaagttgataccgctgtgagcggggaagtactcgtcgagagcttcacggagaacaccagccatctgctcaaaggtgttgtcggcgcagaagccaccgccgacgtccagagtcttgagcgaaaagccataagaggcagcctgctgaaagaccatgtgagagtcacggacggccttcaagaaagcgctggggtccgaagcgccagagccaacgtggaagctgacacccacgacgttaaggttcaagtcgcgggccaaggccaaaagaccatcagtcgagtcgagcgaggcgccaaacttcatgctgaggcggcaaagggacgacgtgtcgtcggtaaggatgcgcagataaagctcggcctcggggtagaagcgggcaatcttgcgaagctcgtcggcattgtcaaaggtcatggcacgcacgccctgctgggcaacgtagcgcacatacgagttggtcttgcagggctgagcatagatgatgcgggaggggtcaactcccatgcggaggacctgctcaatctcggccttggaggcgcaatcgaagccattgccaagggcagccagcaacttgaggagcatagggtccgggttgcacttgacggctattgcgtatgttagcgtcctgtttttctctcatcttctccatgacaaaccacttaccatagaagggcttgacgcgaggcaagttcatcttccagcggaggtgctggcggtagacctcaccgaggtcggccacaaagaaggtgtcctcctctccgggctcgcagtcctcgtggtcaatgctctccacgcgctggcggagggcattgccaatcagctccttggcggtaggaccctcatggtggtggtggtgttcacctaaatggtgatgattgtgttgctcaaagtagccattgttgcagctctttaaaaagacatgattattcgttaattccgtataatcgagtgatacgaagcgatcggcgagcaaagttggcataaccatatccgggatcgtaacgggggtgagcggtcgagaagaattaggtggtgggtagcggcggcgggtgggtagaatattagagatgttctcgtgatctcgagcgtgggtgggtgatgagctctatatcgagtttatcgaaagctcagaatatgttttttgggtagtagataaaaagcgatgtgatagcacggggtgctcaagcgagtattagggaggtcggtgtgggtagcagactggtccctcaaaggtctgacgaggcttcgtcgactcttcctccgtcagaggaagaaccgcacaactcgtcctatgcggcagctggttgttgttggtatcgtggggggcttggttgaacaaggagtcgaacagggagagctcgagttccttacgcgacttcagcagggggtggcagggagttgatgatgtgaaaggtttgtcgaaggctgaaatcttggtctgagacaaagtctacggccaaggaagccgtattgagcttgggtgcctttgagaagaccaaaggcagtcaggcgtagcgatggatatcgctagctgtttctgtgaggcaggatgcgcgtcagcatgtgagaaaactcctacggatataaacaatcaacagcgagcaaccccgctggaagctcttcagaaagccatccatcccaggtctgagacataacgcatgccacgaggccgagtgggtgggatagagcccaacccagcacggtcgcttgcggtcattgtcacgagcgggagctcccagcggtcgtgcgccgatatctatccgcatagccgcggcgaggaggtgaaaaatttgcacttacttgggaggtgatgggtgcgcgaacgcagtaagtgcaggagttgtccagtgtagcaattgatgccaaggtcgatgatgtgttgaggaaggaggacagttggcaaagggaaaatcgtgggaaaggggaagaggttcaaggacgggggtggaaggtttggaagccggcgttgagcttcttaataatggaggggcgcagagtgggcgggaggcaggtgctttggtggggcattttcgatggatggctgtgcctcgatccttgatttggatttggcagagcccacaacaaaaaaaaaactccaaagagggcaccgcctttttttccaccggtcccagatatttcgagacaccgcctacagatgacagatggtgtctacagaaaccctaaggaccctcggcaaccatcttcctgtgacctacctagacaaactcacctgccgtctttggcaaaacatcatatcgcacctgaggtggccgcgcaattccatcaacttcccttcaagtgtccccgcggcaaagatgccatgctctgctgtactacagcagcatacctagctacctatctacaatgcgaggccaggccgccgtccggtgttgctgacgctcgttatgccggatatctggccgaggccgccgtctcctggcccagtgcaatcacaactcatgagatggtgggtggtctcctagcccggtggcgtgccatcactcgatccgcaacttgcggtcagcgagccagtttcgatgcccaagttccatcccttctccgctcgttagcggacgcttatggtgttatgcgggcccattgcaccgttggtcacgttccagcatgcaacccatcgccgatatcttttcgttctgtatcgagagagtccatggccggggaaagaggagagagtaggagcacactggagccggtaaaaatcccgcaccatcaatcagcctgcttttgctctctctggcattccattgtctttgcatccggcggctatcttggctaaggagtgactgaagattttaggtacagcattctcccacgagcaacttttctcacccaccccaaggttttgataccagcagcccacagccatcccatgtagatctggccaatgtcgtcgacgagctgcacgtatcctcttggcacacttacttctggttccccgcaggaaaggactcagacccttcattggtcttgccgactgtccctgtgccgatatgctccccccgtgcagccaactggaagccaacgggagacgaccaatgcatttgactcatgtgaaagaaaaaaaaaagataaacagccactcggagctgagccgcatttgaaccacccacttgagaaacgtagcaaccacagacaggtacctgcgtgaacgtgacgtaggcggggcaagaaaaaaaagtaaccacaagagtcaggggcaacttcaaacctcaaaatgaaaaatattaaaatgtactctgttctttagtccgcaagtccaaagctgtggaaggcggttctgaaagaacgagctcgcggcgccaggtcttactctggtcctttgatcttgcgttggtttgtggcctcatagctattgcgtgaagcagtgaggagtatcgtatctaaacgcgtgtgtatggtaggtagggtaggagaaaataaatgaaatggaagcatgagaaaatgctagagaaggctgatgaacacaagtcatcaggcacaggacctagaaaatgtcgcaaatgattcatgtacaccagctggctatcagagaagggtatcatcgttcatgttgtacagtaaaaatacaaactgcaggccgtcgaaaactgcttaagcagacccgccaatgtccatctcgttgacggtccaagagtcatcgacaaagtcccgcttctcaccaaggaagacaagccgctcagcttgcttctcgagcgcgccaacaatatacttctgagccacctcgcgcacttgatccttggagacatcgagaagctgctcgcgcctcttctgcttcatctcttcggtgattccgtacaggaagttgctcatgccctcctcgttgacagcccggggcgcatcgacgccttggaagatggaaatcttggcgtcctccaggtcccggtctgaccacttcttgtcaacagcccattgtccggcactgcgcatgatgttgatcgtgttgaccgggttggggtcgcggtacgagtaaaagccaaagatgccgtccagggctcgggaatatgcaccgccaccgtaggcgcctcccttttcgcgaatctcgtgatgcagatgcttgtgagtcaagagcgacgagagcacctggagcggagcattgtcaggcgatgtgtaggagactgtcggcagagcgagcgcgccatagtaaacctgatatggcagggggtagaacgatttgatgtttctcgcaaactgggtcgctagcctggcggggaaagtggcaggcttttggggcactgaacccaggaacttggacagagcggcagtgttgttgctgacgctttcagtatcacaagtgatcgaagcccgaatgttccctgcaagagcaaactgctggatctgcttcaacttgtcgatcacatcgacgagctggtccgattcaggccgacttgccaggctcgttatcaacttgacttgcgacaaaccgctgacctgctcccgaatgaaagcatcccacgacaagcccgcttcagctgctctgcgggcataggcatgaccagaagaggcaatgtcgttgacaacgccatcagcaccagcctggagaagctgccggatctgcggggcggcgtctgggctgtcaaagttggtctcgacaatcagcttgcgaagcagatcaaacatgacgggaacatttctgtccagggccatgcctgtgaaaataagaccctcgctcgcctgcttgaagtccaacgggttcgaggctgtgtgatagcccaccgacacgccgccagtcttcaacttcatcagatcctccaactgctccattgtcatgtccttggtaccaagacgcatgatagagtcagtaaagagaggaataagctgtcgaagctcatctggcaggttctccaacgtgttgatcgcccggaagtatgtaaggccgtttgtgggcgcttcccgcaactgaagtttgaccttctcgacagtctcgttcctgagcccaacaggctctttcgatcgtggaatgtccttgacatatacgcttgggaggcagctgagatcttcagtgttggactttccttgctcagccagcaaagccaactcctgtgtttcaaacgccttctgggcctgctcttcgccaccggcagactcgacggcctgggcgatcttgcccttcagcctgaattcctcctccttggcgagttcctgggcaaacacgggagatggggccatggtgaatgtgagagtgttgtcattcaacaggtactttttcatcaagccctcaaggtaaccgcccttggcgtaacgctcctcaaaggcagcgagggtgtcattccaagacaacgaatcaaaagggtcgactcccgtaaaccacttgggcttgagacggtgcaggagagacatgccaaaattagctgtcttgtgcttcagacccaattccagctggtgcaggtagccatcaatcttggaccgctcaaagcccttatcccgcatttgacggaggatatcctgcacggccgtcttgagcttgggaacatcggcttcctggacaccagtcagaccgatagagaagattccaaccttggccgaactgtcgtaaccggtgttgggactccaatcggtgccgaggccactctcaatgagccccttgtaaagcggcgagccatagccatccgtgagcagcgccgagatcaaggagagagagaaggactctactacatcggaagtgtcgccgaggacccaagaaacagaagtcttgaattgcttgctggggtccaccagggggtcaatgggtccatagagcttgacttctcttgggccggagctcaggtcgataggcctgtggttggccaaatcacctctgatagcctcaaaagcaccaagctgagcgtcaacctcccgcaagtgatctgccagaggcatatcaccatatgtgaagatcttggcattgctcgggtggtagtgctcagcatggaactgcttgagttgctcatacgtcaggtcggtgattttttgaggatcaccacccgaattgttgatatccgggaagatgtggtcctggaagcggatgtagaacagataaccagcatcagacatctggcccttcatctcgttatacacgacacccttgaacacaagcttcttatcctcaggcttagcttgcgcctcacccgaagccagagcctgggggttctccggtccaatgcgccacccttcctgggtaaagtcggacttcttgagcaaagggcgcagtgtggcatctaggtaaaccgacatgaggttcttgtaatcctgggcgttggtcgtggcgaaggggtagaatgtgtggtccgaggccgtaaaagcgttcatgaagttggagagggtgcgtgggagcatcttaaagaatgggtcacgaatgggatatctttacccagttagcctagctccagcaagatagatgttgaatagagtggccagctacacacttttcactaccacagagcgtggtgtgctccaggatatgcgggacaccggtgtcatccggtgggttggtcttgaaaccgattgagaagacattgttgctgtcgtctcgcgcaatatggagatgttcggcacccgtcttgtcgtgccgcaggtgcagtgccgtcagttccagctctggcacatgcttcgtccgcaaaagtgtgaagccgtgaagtttctcgccgatcttgggaagctgcgagagctccgtggcagcctttgcgctgcgtttgaccgtgttgcgaagcatgcttccaggttgctacagtcgtcgttcgatattatgaggcggatgcagcggaccggccgggttttccagctcaggtaggtgtgaagctgtgcgttgacagcagacctgcggctgtcctggagtcgggatttgggggttgtcgtcgatgtgatcgacttgatggaatcaaatggttcaatgatggaaattcagaaattgaaccatcccgttgggcgtggcgcgttggaagattgttagcaaggaacagtagttactactgcagtttgggagatgggagaggtactagtatatcgcgcaacggcccgactcgcaacacgtgggaccgctgagtcgggcgggttaacgtaccgagttacagcgaggcaggcgaggcacagcgaggacgagctccactgttccaggtttgccagcctgaagagtgaggcttgttcggggcagaacctggggactaatgcaattgcgacgacatccaattctggagccacgcaggagcaatctctgcattcaaccacgccgagcgagcaatatcaccatccccaaacctgacgctgcccggatcgcacgagagcacacgacacccccccacggcacctggaagtctcagtgaattatagaggaggctatagagcaggcaaacaatagccaccaccgcccgtgcacggcgggacgcatgcaatttgtgtgaccaggcgagcgtcttctgtttgaattaaccgacacatcgacactttcgcttcctcctcgacgacaagcctccgcgtcaccctcgtatatccgtcttgctcccggttttaggacttttggaatagcatcaggtcgaattcccggttgcgagtagcaacagccacaagtttgctggcttgggattgccgtagccccgcatcgcatcgttctgcctgcccagccaaccctaacgcactctgagatctgtgagcatcatgtcgaacgccagccccctcgtggcctcacctgccgcgacggctccccgaccagctacaccggcagccaacggagttccgagtcaaccgccgcctgccgataccgtccccgtcgcgaatggccatgctgcccacacgcacgagaaccggcccgcccccgccccgccttcggccgctgccatgacggggaagaaggggaagcagaagaagccggagccgaccgaggcctcgaagctcatcgcccagcgcatttcccagctcgaactcgacgccgcaggagaaaaggatcaggaggccgagattggtgggtgttcaccctgttttctgtgtgtctgatggggaggtttcgctggtcgccacgttgtcggggaaaaaggcattttttggggttcctctttgcacaaacctcacacccaggactacgggaccacgaaacacaagccagttatgactggaatatgggctgacagagatcgtacgcagaacgggaagtcaagaaggccaacagggagttacacacccagacctctcggatgaacgacttgcaaaagattgatcatctgacgaagcgatgttcggatcttctggctgagatgaaacgccacgagcgagaaagcatcaagaacaagaagcgcggcgaccagctccagaaggataaggacaacacccgtaccgagttaaacaagaccacgtccctgaaggagaagctagagaaactctgccgggaacttcaaaaagagaacaacaagcttaaggtttgtatacggctgtttcggtctggcaggactgagggcactttgtgctgacttgtctgcagaatgagaataaaacactcagcgatacccaaatccgcagccaacagacatgggacgaaaggtattctgggttgctccgcaggatggatgaccagcaggaggagaaggacaatccgcgcaaacaagtggtcgacatgaatacggaaaagttgtatgtgcgaacctttgctcgtggtttttgagctcatcgttgcttacaagcgtagtttccgagatcgcttcaagtccatgatcgaccaatacgagctccgcgagttgcactttcattcccagatgcgcaccaaggaactcgaggtccagtataacctcgccaggtttgagcgcgagaagaagaactacgaggctgagctcacccggtcacgccagcttaatgcgcaggtgcagacattttcccagaccgaatcggaactgagacaccagcttaacgtgtatgtggagaagttcaagcaggtatgttgtcccttctcgccggccacccagggcgtgttggagtaacatggtcgcacaggtcgaggatactctgaacaacagcaatgagttgtttatgactttccgcaaggaaatggaggacatgtccaagaagaccaagaggctggagcgtgagaacgagactctgaagcggaagcatgaccaggtcaacagcaacatcttcaagatggccgaggaacgtaccaagaaccttagcgaggttgaggatttgaagaagaaggtggacaagctgaatggcattatccggcagatgcagcagcagggccgtggcattccccagggtctcaccaaccctgttgagaatgggtacgcggaaggcgacctcgagggtgacgagagcgagtatgaggatgagtacgacgagggtgaggaagatgaggaggtcagcgatgatggggacgagtacgatgatgagaccgaggacgagtcgcagcagcagcagcagcagcagcctcagccttatggccccgaaagacctccccctgcccccgcggccaccactaccactaacggtcatcgctagggagtatgtcggatagtgtggcagtgaattatatgcatctttcagcggaacaaaagtgcgattctcccctctctacttgctgactgacgttggtgggcagtaacttttgtacagtgatgaattggtccatatgctgtgtcagtatgtttgtactgccatttgaaatcggtcctggccgggtcgagtcaaatagtttgtttgggtcttttgagtttgatgatatcatcatgagcaagacttgagagttatgcaccaattcgacgccatatcgttctaaacatctcgcattactaccattgcccgagctttatgcatatatagagtagatctaccccaccaaagcatcacttgcttcaatccggttccacttcttgctgcgagacactgcattgtgccgagactctgtccacacttagctgttgtggcccccatatgggagagagagccagagcctgccgccgactttcctgctggcctgcctacatgcgctctatcgttttgctgttgaagctgccattctgaaacagtggttccctttctttctttctttctttccttctcttcaatgttcaccttttgcgatcctggatcttcattcctcgacgaccgcgccaattagtaattcgggccagcgtgtactgtacctaccgtaacctgagatagaccttaccctattctgccgcctccccaaccctggcttggaacgaaccgaaccctttgtttgcgcgcgccttgcgacgacacaaactccgttcctggatttttgacgacggggctgtttttgttcttccttattaccatctatgattcctccgattgctttcgatccatcgatgccgatacaacaaaagattgtttgcgccactaggctgcggcgacggttttcttgaatcattcgctgctgcgcgccaggaggtgtggtttatgttggagagagaaaggacagagttgcgagagggatatcatcatcgtccgggttggataggaaagggaataaataactttcgaataaaaccaacacacacacacatacacacacactcaaaccgaagcttctacccggccactatcctggttcccccgattttacacaaagcgagcccaaaatggccttcattcaggacccccgcatgcgccagcgctggaaccaaatctcgcacacgaccgaggccgtcaccgagacggcagcggccaacatttggacgtttggacacacgtacatcaccccctgccttggctccatcggccaggctttggactcgtgcacctctgtctgtcttggcgaccgggaggaccgcgcgagacgcgcacgggagcgagaccgtggcgcgaggaggacgagggcggaatacacgtttgacttttatgacgattgggatgattactatggtgatgttgaagacggtcccgaccaccgtgagaatggtggggggagtggtggtggcggtggttgggggaggtggggggtgaatagtgaggattgggataggttgttggctgggacgggtgcggtgaggggggggcagggggaggaggttgatcagcagccaaggaggaaacgggggatgagttatgggactagtcggataaggaggaaggggacggggttggtggaggaggaggatccgaatgtgattcctaggacggcgccgctggggttcttggggaggctgccgtttaagattgtggggagtttgaggtataagccttcggcggcgaatttgagggagcaccctggtggtgggacttttgggagggggggtgcgggggatgagcataggcctttgctgggggcgcaggaagaggagcatgatgggaagaggcagaggaaacggggaggggaggagtcgagtactaggacgaggagcaatacgacggagtcgggggacacgagcagttcgtataggtcaagaggggatttatttccgagtgatggggagggggatgaggatgcggtgccgttggatgagaatgagtttacggttgcgctgaatagggttggggttgatgatcggagtagtaataggacacggagcagcaaggggaaacgacctgctgatagggatagtaagaaggggctgtcgaggacggtgtcgaggaccacgcttgattcagcgtacacgccagactcagcgtcgccttttccgacgtatgaggatggggatgctgtgccgttgtctatgcaggaactgcaacaagaggaagagcgtgccaagaaggaggaggatgaagagattgagaggaggaggagggcagcaagccagttggcggtgaagaggggtctgagtgtggatgactatcaggttgagtctgaagaccagtcaccatgcaacatcaaccagagcttaccaaactctgaccctgacgaagaaacccaacctgaattagaggcaaagataccagtggaagaaccacaaaaacaccagcaacaacaagagctggaattacctacagaacccaagaagatgtcagaggtggatccggcggttcggtttgtgcccgcgaagctgcctcattttgggtgatcggacatgattattagcatagcattattacagagatgaatgggggagggagggtcatgacaaatgagacgataacgatgaattcaatgtttgtacaacgtctttatgggattacttggtagcgaaaaggtcaacttcggtagggattcatgatagatttctagtgtttttatcattactattgattattatgaagccagaatgaaccaactcacccatcaaaggcaaatcggacgggtttcagatccctacttcttcaactccgtccccaagagatggatctgacgtttcagccggaagctcacaattgccctacagttggagatgcctcggcaacatgcccttctttgaggcgtcgaggatgcttccccgcatctcccccccaggttttgggtccttggcggcgctgtgggtccggggtagggtgggtttcccgcccttttctagaccgttttggggagggagttcgttgatgacggggtattgcggcagggggagatcgatctggctgggtttgtagaaagaatatatttggggtagatctttctctttttcttttcctgtttttccttttgccttgggagatatatcccacttgttttcaacatttgtcggtttttacatctaacacatcttcgagcgggctcatctacacttacaccaactcacccacttttctcactattcctacaagatggcctcctccggccccatcaccaccccgctcacaaccctcctgggaatcaaacaccccatcctcctcgccggcatggcccgcacctcctccgccccgctcgccgccgcggtctccaacgccggcggtttaggggttatcggcggcttcatgtacacccccgaccagctccgcggcatcgtcacagagctcaagtccctgcttgctcacccctccctccccttcggtatcgaccttgccctcccacaagtcgggggcaacgcgagaaagacaaaccacgattacaccaacggtaaactcgacgagctgattgatatcacgattgagtccggagcaaaactgtttgtctgcgcggtgggggtcccgccgaagcatgtaattgaacggttgcacaacgcagggattctaatcatgaacatggttggtcaccccaagcacgcggtgaaagcgttggatcttggggttgatatggtctgccctcaggggggggaggggggtgggcacacgggggatatcagtgggacggtgcttattcctgcggtggttgatgttgcgaggaaatacaaaccccagatgctcgacgggcagagtgctatggttgttgctgcgggagggattcataacgggagggggctggctgctgctttgatgcagggtgctgttggggtttgggtcgggacgcggtttgttgcttcggttgaggcggggtgttcggagcagcataagcaggctgttgtcgagtgcggctttgacgagacggagagaactttggtgttgagtggacggccgttgaggatgaagacgaatgattgggttagggggtggcatgcgaagccggatatgattagggagttgaccgggaagggggtggtgccgattgagtatgatcttgataacgggaatgagattgatgtgcctcatctcatgggccaggttgcgggcgcgatccaaaaggtgcagccggccagggagattgtcgaggagatggtggaggaggcggtgcagatgttgaggttgggggggcagtatcttgccggaaataaagggtccaagttgtagatgatagggatatgtttcggctgtgtcgtttttcaagtcaatatcaaagcgtgtaaatttctgatcaagttccccgtacatttgaatccttctattcctgaattttgagtggattatgtacaattaaatcaagaaaagtctataccctccgtatgccctctatctatgtgtatcctacagtatcactacaaatcctttaccaccagcttgctacaactgcttctactcgagtacattcaacttcctcctcaccgggttaaagtcggtattaaactggtactttccatccccaaccatcttctcctctctgctcacggcctccaagttgatatccgtcgccatcgcgttcaggaaattgcagattggcttgggatgccacctcccgccaccaatttcgaaccaagacagatgcccgccaagagacgtcgtgcagagaactgtgtaagggttcacggcgaactcctggtagggaatggcttccttgacggcaattgggtcatcaagggcggagatggccaggaaggggatgcggatggcgaggatggcgtcgcaggaggaagcgtcacggtagtaggcgttttcggtagggtaaccccatgtgacggtctggactgcgcggtcaaactcgtggaggtaggtgacgttttggacgcggtcgtagtcgacgttggtgtatttgaggatttgctccttgtgttgttcaaagagttttttgaggttgtctggagtagtgttaggcactgcgtgtggaagaaaagggttaggaataacttactgcccatgatcttggagtagacctccttccccaaccatgtcctctgaagccccttgtttgacacctccaagtcgaaagggttgctcacggcaatggccgccttcaatgggcagtttgcaccctcctcgccaacgtaattggtcatgatattggcaccaagcgagaaacccaccccaaacagaggtctgttgggaaacatcttcctcgcccacttaacaaactgcctcacatcccacgtcgccctcgcattgaacaacacccccgtcgtcaccttgctgttcgcgcaacctctcgcattaaccacacaaacctcccactcgcccccatccatcaccaagggagcaatagcatgtcggagataaatctcatgagacccccccgaaagcccatgcagcgctatcagcataggcttgctgtcatcagacccaataccagcaaactcttcctccgagtaaaacgccgttctcggcgggagctcctcgtcaaagtccttgtgttgaggaacaacaaagtcgacagcaaaagtgccggcgtaggtcttgtggtcggcgtcaaagatctttctcttgtagtagatttgcgggccgtgctccttgacggctgtgtacatggtttggaaatggccgttgaaaagaagggggttcatctgacattttggcacggcggcctcgacgaccttgaggaggtcggtttgagagccatctttcctggttaagggcaggggggtggccgcgtgggcaaagtcgattttggcgcggccgaaccagtccatagctgcgaggtgccgtccgcgacgagatagggctgtgcggaggagggacagtgtgtcggagagactggacttgaggggtgagtgagcgggaagggcaaagatgggtggatatgaaaaggtgtgaagtcctgggagttcacagatataaaaaagggaccaggagaagccaagacagcgggatggaacctggttgattttagattggtggagttcaagctcggaatgggttttcaaagagaaacccgtatttcgatttctattttctatggaaagtccatggtggaacaaggaacaggcaatcgggtatataaagtccaatcaatcgaggcaacatgcaagtcttgattctggtcgaggtcgttgtcctggtcttggaagctgcaagtgccgaggcacgttgtggggcaaccgttactggtctctcagcctcggtgccaagattcaacgtctcgatatcatatcgataagagtggtggagaccaatgtcgaccgcttctggcccgacggtaaaaatatgagtctctttctggtatacatcatgtcagtctctcgcccccgcgcagaaattgagtgcttacacaggtagaatgcccaatatctaaagcgcggggactatccaacatcagcagaacactgcatattctgtacaaaagctcctgcccaatggatggccagaccgtctgaagtttagtgggcctgccgggctgtcccgccatccaaacggcggggcatttcgaacttcagatctgtcagagagaccgctgggacactgattgtatttagtaggaacacctctttgggcaggtccaagatctcactttccatataaattgaaccaggacccaacccttgggttcaagaaccctgatgaacaagccaccattttgattcgtcaaccccaaacacaccagaaaacccacccagcagctaccccgccaaaaaactagcaacaactaacagcccaaacagtgctgactgcccatagctcctgtgttctacaaacccatcggaacaacagcagcagcagtagcaagcagccttgcaggaagagaggggtatctattttatctcggtatcttttcatttctttgcccgtcgcttccaggctgaacatcagctggaaacctggggtaggcacaccctctgtcgaccatcattggccttctccccttgacgaggtggctaggcagcagacgccttatacaccggtatgtatgtcagactcgagcgcagtagctcaacgcccccctcctcacccagccaccaatatcgtcttgtcttttctttgactggtgccgtcttcttggacatgtgtgatagctatccatatcagcagctggtagcgttaccttgcgcattcctcttgccctcttggtttctcagctgtccccttgcttctttctaggctggccacaccaccagtatcaagatgccagcctggtatcggctatttgggtggctctcctatggactaggagctcttcatatcaccgcgggcctatcagaagcgacgatttgctatgaccatgagtatgctccggtctaacacactacctactttgcgaagacgatatacccgttggccttcccatattgtgccctagtcttgaagatcaccgtgtccctatttcctacattcatttggacttttcacatcctctttttacgactggggctctcgctgacatgatgctagctccataccaacttccataaccatcatcaacacagccaatatgtcgaccgaggctcaaaaaccacggttccgcaaggtccaaagctttcagtccgactatgccccaactggcatcacccagtacgtctctgagcgaagtggcatgcaggttattgtggccgaccgcaagggccccaaggtcaacggctacttcacactagccaccgagatctttgacgactctggtgcgcctcacacattggaacatttggtctttatgggctccaagagctacaagtacaagggcctgctcgacaagctggccggcagagcctactccaacaccaatgcctggactgccgtcgaccacaccgcttacacccttgaaactgccgggtgggatggctttgctcagatcctccctgtctacctcgagcatgtcattctccctaacatcacggatgatgcctgtgtgaccgaggttcatcacattgacggcgagggcaacgatgccggtgtcgtgtactctgagatgcaagctcttcagtacagcagctctgagctgatggatcttcaggctcgccggttgctgtatcctgaaaatattggtttcagatacgagactggcggtatgatggaggcgcttcgggtcttgactcccaacagaattcgtgaattccacaaggccatgtaccagccccagaatctggctgtcatcatcactggtgaggctgaccacgaggacctactgaagatcttggacacgtttgaggagagcatcaaagatgatatcccaccaccaaaccccagcttcaagcgcccattcgttgactctccccaaccacctcctctcgaaaagaccattgtccagacggtcgagtttcccgaggaagacgagtccaccggcgaaatccttgtggctttcttcggacccagctgcattgaccagatcgagggcacagcggttaacatcttgatgacctacctctgcggctcgtcggtctccatcatcgaaaacaccatcgtggagagagagcaactggctagttcggtttcgtactggtgggactcgagaccaaactccgtcatctggttccagccaactggtgttgccactgagaagcttgcctttgtcgagcagcgcctggttgaccttcttaaggaagtcgcctcgaagcctcttgatatgaactatatcaacgaatgcctccagcgtgagaagcgccaagtgaagctccaggcggaatcctccgagcagttctatgccagcaacattattacggattatttgtttggcaagcgggacggctctaccctgagagacctggagaccctgaaggagtatgatgtgctcgagaagtggactgatgagcagtggcgtgcctttttgaagaagtggatctctgacgcccatcacgtctctattctcggaaagccatcgcatgagctggccaagaagctcaaggctggcgaagaggagcgcatcgccaagaggaaggaggagctcggaaaggagggtctcgaggctctcaagaacaagctcgagactgccaagcagaacaacgagaagccaattcctcctgaggtgttggatcagtggccagttcctggcaccgagtcaattcactttattgagtctttgaccgcgagatcaggaaaggctcgtgcccttggtgcttcggacaacaaggcgcagaagatcatcgatgcagctcctcaaggaaagcccctttttgtgcagtttgaggatgttccgtccaactttgtgcacttgacgcttcatgtcggcctctctgagacagcagtcaagtacaagcctcttctttccctcttcaccgacaacttcttcaactcccccgtcatccgggatggcaagcgtctcgaattcgaggaagtcgtcaagcagcttgaaaaggacacaatcagctaccacatcagctcggccagcagactaagcgattacgagggtctggctatccagttccaggtagacccggaaaagtacaccaccatcatcgactggctgcgcacgctcatgttcgacattgtctttgaccctgtccgcatcaaggctgccatcgtgaaagcccttgccgacatccccgagctcaagcgcgatggccggaccatggctcaggaagtcgacatggccatccacttccgtcccgaggcttacctgtctgcgaagcgcaccctcgtcaaggcggtctacctccgtcgcctcaagaagcttctcgagaaagagcccgagaccgtcctcgggtggttcgaggaactccgcaagtctctcttttcgttccaaaacctccgcgtgctagtcaccgccgacgtggccaaactctccaacccagtcgcagcctgggacgcactcacctcccaccccgacctcaacccaaccaaggacgtcctccccatcgtcaaactctcggcaatgctcaacgaagaagggcaatcccctggttcggtaggatcagtcatcatccccatgacaaccctcgacagctcttactccgtctccaccgccaccggcctgtcttcctactcctcccccctcctcccggccttcctcgtcgcccaagcctacctcgaagcggtcgagggcccgctctggaacgccgtccgaggcaacggtcttgcctacggggtttcattttcgagggagatagacggtggatacctccagttcaaggtttaccgctcccccgacgcctccaaggccattgaagcctcccgcgcgacggttgcgaagttggcctcgggcgaggagccgctggataggcacttgatcgagggtgcggtcagctcgattgtgtttggcgtggcggacgagcagtctactatgacggcggcggcgcagcagaattacatgatttctgtcgttcgcgggttggagcaggggtggaacaagaagattctggctagggtgagggaggtgacggaggaggagattagggaggtgatgagggaggtgatcttgccggtttttgagccgggaaggagcaatgttgttgttacttgtgcgccgatcatggaggaggtgagttttccccttgcccctgtctacctaccaatgggatatgattgctgatgaaaatgttgtagaatatcgtcaagacgctgggtgagaggggttacaagacccaggttcagacgcttgctcacttttatgatgactatggtctcaaggctgatgaggaggatggtgaggatgaggaagaggaggatgaagatgaggatatgagcgctgggtcgtatgagtctggtttggaggaggaggatgatctctagagggagtgttcttactagaccgcacaagaaacaagttcaggtagaaaaagaggggggggggggaggggggttatgaatacatcaatacttttctttcttgttgacaatgctagtttttttctgtctctgcacaaaagtaaactcagtgcccacttctaacaggcaggtaatgataatccctaaccgattactgaccaaacccagctgtgaaaacaaaaatcccaaacgccaatgctatgcatatttttatgcctctgacacccaataccaagggccaacaacaaaaaaccaccccttcttcttctcgtctattcaacccctcaaaacccgtctcgacatccccatcaaagcctccaccgccctcttcgccgcctgctgctgctgagcagtctcctgatccctcgtaatagtcaaattccccaactcgcaccagttattcacaggctataatctccagtcagcatcttctccccatcatccccccccaaaaccgaggaagacttaccaaacaactcaaatacttacaccacccacaaaccttgtgatgaatataaaaattattcaacaacaacacaaacaccaccagcaccaaaatcagcgcccccacccgaatcaaccaccacccccaccaaagcggcttcctccccttgaaaaagcccacgggattcttaaaaaacggtggcaccgtcccctccttcaaaaacccagacgaaacttgactgttggcatagggaacctccgactccccaatcctcctcctcaacgagttgggcgagtgaaggatacaaatccccagcgccaaccccatcaaaaacccgccaatgtgactgaagttgtccagaccgggcaagagacccaggacaaaagagatgatgatgtcgataaagaggtacatcaggtcctttgtgggattcaccctgtctttccagctgtacaacaggtccaaaaaggtgagtgcgataatcccgaataatgaacctgatgcgcccgtgctggcgatgccagtcgcggcaaagttaccccccatgacgaaaccaaagatgccggccgacatgtacactataaagaaccggatcgagccaatgtgtttctccatgtcccttccgagtgtgagttgaagcagcatgttgaagccgatatggatcagaccggcgtgcaaaaagatggggacgatgaatctgaaccattggttcggttccggcggttggcccggctgctggacaccgccgaagccgcagagctccgagagggtgcatgtgttctcgttggtggtcgaccaggggcagggccacgagacgggtccttcggcttcttggatggccttgacgttgtgcatgcaggggacgaagcgggcgcccatgttgatgaggatgtagggggagggaccgatcatggggttgaattggggttttatcatgattggggagccggtcgaggtgcctgatgaggggtgcggggaggttaacaatgttgatgagaagggggagggagattaaaaaaaggcggcataccattcttgaccaattcaccgataaaaactgcaacttgaacaatagtaaaaaaatacaccacaaacggtatcttcttctttcccgaccccagcatgcccaactcccccaacctcacccgccctttgcttggtggtttgttcggcggctggtggtgctgcgacgacgaagtatcatagacgtgatcctgcatctcgatgtgttgtctcgaagggtgcttctgcatgttgtcctgcagcgggatgtcatctggggcatgattgtaagcaggcatttcatcagagggcacccgcgagagggggcggtagctcgtgtcttgctgacttaggcggcgcgcttggtggctagaggatggtgctgccggatagacatgatcgtcgaagacggtttcgaaaggtgaaggagacacaccttgcgccgccggcggccggtccttcccaggtccaacgagattgtggtgggagctgtaggccggggcgggcgccgagtaagcagagggggattctgttcggtattggtcgttgccgccgtagtactgattgtcagctcgggacgtctgactgtagtattcgttggaagccatgacgggctaattcttttgggggctggctcccgagcgtaataaacagcggcaggagagcctgcaggtggtggtcgcaaaagagggttcgtaatgatcgggaggaggtggtttcgtgtaaacgaggggttttgttgttgcaaaaggaacaatacaaatgagcgacgggtggttacagcgagcgaacccaggcccggtttgttcgttggtttgttatttttttttggtggttttggatgttcgattgacaggaggaggaattgggaatctggcgattgacaggcggatccccttctgttgtgtttcggcacagcgggagcagggatctccgagtgtctggggtttggggatcaagaggggaaattgcgtcgcaatatgttccccaaatgttcccactttctagcgtgcccacctctagatttcttccaccttgatgatgatatccaagtggcctaggtaaaatgcctaaccggtcgtctcactgctgcagctgccgagaaggtcgagtgaagtttaaatgttgatatggccgtggtgacaatggtgcatgtcattgacatgtggtacgcatggaatgaatcaatgatgaagagatgggacctggaatgcgcagatgctaagaagggagaagaagaaaataaatcgttccttaagaaagtaaaccaggtttccagttttatcaggcgatcaggcgccgtcacgaagaccttgtgtgatcaaatcagtgggctcagcttcaagctttaaacgacgcggccacacacgctgacgtctccccccgccaaggtctccaaccagccggcgcggcagtgggacagtagggtccggagatcagtggagcagacggcggctgtgctcaatgcttcttgaacctttgcgcgtgttcaccagtccatttattcgtatttttctgcttgggatactggaggccgccacacttgatactcagactcttgacatccgatcattgggactcgttctgtttttggaaacatggccatacctcagcatcttgccgcccaaagatcggatggtccagggcaacctgtgtccccgtggggtttcatcctaagcttttatgacgaaaactgccgggttctggcaaacgactgtgctgatccccctttcagacagattcccgtgccttacctggtcatccagactggcttgccaagacccgttcatccaaactaaaatctggactcgaatcaagaactgtcttgcgaagagacagcgaacctctccaaaggatcttcttcagccgcagaggtgacgtatttcggagcaccagcctcgtgctcccccaaagcctcgaagacaagcccacttgccattaccccgggacaaagtccgaaccctgatgaggagaagggagaaccaagctttcggggcccatcttcattaccttaatcggtgccgacggcgcagttgccatttgatggacacttctcctggcacccttttacaaatgagggccgtgatgaacaagccaacatgtgtttcggagagctaggcatctctaggaattagttctctagtcataaagctctgtctagtccaagaaactgatgcctttggttggtggttccttgctctgagcaaggttgatggatgccaagcatgccgataagataaggtttggacccacatgtgtttctagagtattcgcaaccgcgatgcgacaggatgcgcctgcctccaattgactctgaaaagaaagctccttccttcaagaaacacaaccaattggccgcgagactttcttcggccgtacccttgaccttcacctcaacttttagtcatcagaaaacagctgtaatctctttccatcaacagcaacctcgcctttgaaaccttcaccatgtcgaagagcaagatcgccaacaacagggccagggccaaggcggagaaggaggctaagaagtaggctaagaatagtgcgaggaagctgaggagggaggctgctgctgctgcggcggcggctggaggggagaagaagtagagggtagtgggagtttggaatgtggtatcatttgccgtgagacaatcggcagtcgtttcgaggcacaatgggaatcagcagctatgattaatactcgatggtattatgggacatgtttctagctgttagtgtcaacaaagcaagcaccctttaagcagaatgaaaagaggtgccaaacatgaatacaaattttgtggtagtctcgagtcattatgttgaatgtgatatatatatacaaggatcttttcaacgccaatcaaagagcagatcccgccaaaaagccaagaacccttcctactcatacaatggttttacagccctgtcatcatccccttgcaagcccctcgttctgactcagattactatgataccacttaatcgttcttcttctcctccggtttctcctttttctcatcgtccttctttcctccccacccaaaaacctcatagatctgctccataatcaaatccccataccccttcccttcttccagcgcttttttttcttcttccattcttctctcttgccacccgtccttttcaccccccatccatatcttggtgatgacaccctttttctcctcctcctcttttgcctctgttggcggcttaccctcagctaacctcctccgctccctctcctccttgattagctgctttgtccgctgggcttgttcgggaagggggttgaagattgagtttgatgattgggaagaggaggaggaggaaaagagggagtcgagacggtcgttggtgcgcttgtagattgacttgccggtgtagtcgtgggnnnnnnnnnnnnnnnnnnnnnnnnnnnnnnnnnnnnnnnnnnnnnnnnnnnnnnnnnnnnnnnnnnnnnnnnnnnnnnnnnnnnnnnnnnnnnnnnnnnnnnnnnnnnnnnnnnnnnnnnnnnnnnnnnnnnnnnnnnnnnnnnnnnnnnaaaggctaatagtcgcaaggatgtggggatgtcaattcaagttgcgccttatcgataagagctgcgataagattgattttagcagcgttttcttctagaacaaagcggcggccaccaaccgaatcaccggatgctcacatccttgcgccgcgtcttgtcagttgctgggtgccaagagaaagtgaagtgacaaggctcagcctcctccaaccttgaatttctgccttttgatcaacctgcctcttcccaccaggcgacagactttcgcgcacctcactcccactctcgctctctctccatcctgcaacccgccgcgacacacattacacccgacaagtctctcgtttgtgtgggcatttcctacttctctcatctgcgccagccaacccgctttcctttactgcgacaccggcctcttctctcaccacaaccaacacctagccaacttccccttcaccaccgcccaaaatgtccgactcacactccctagcccaaatcctcatccgctccgtcatccgcgccttccacaccacccaagaagtcctcgccatcgaagccctggtccaacactcctgcctgcgcgacgacgagctagcctaccttatgaagatgaacaccaaagacctccaccgcctctgcgcctccctccgcgacgcccggtttttaaccgtacacacccgcccggaagtcattgagggcaaaacccggcctgtcaacaggacatactactacatcgactaccagcaaaccgtcgacgccatcaagtggcgcgtctacaagacagacaaggacatgcagggcatcgccaaaccacaggacgaaagcaaggagtattcctgccccaggtgtaaatcccagtggacgcagctagaagtgctggacagcgtgagcatagaggggttcttgtgtctacgatgcgaggctgtgcttgagaggagtcaagagcaggagcaacccggtcatcagcagttgtcgaggatgaataaccagtttaaattcatgacggacatgctgcagcagatcgacaaggggctggtgccagaatgcagttttgacaaggcgattgcggtggcgagaccgattgtacgggaggcgatgcatgaggttttggcgagcgtgccggtggaggatgcgggggggatggggaagccgtctgcggtcaaggggttggcgaacatggggccgaagacgatgcaggttacgatcagtgatgggaatgaggaggcggagctgattgagagtaggaagaggaaggagaggtttttgagggagaacgcgctgccgagttggattacggatagctcggtgccgggcgccggctgcgacggctgcgcccccggtggtgagctttgagatgagggatgcggatgggggggatgggggacgggttgggaagagggtgaaggtggagggggagatgagctttaagatagaggaggatgaggaggatgatttggagtttgaggatgtggtttagggggggttgctggggttgtaaaggatttcatgggggtcgattcggaggctgctggagcggtggccgtgaaggatgagtctacagatgatgaaaagggtgtggatttgggcaaggatgaattggaggacgatgattcggacggctactattccgaagacgacaaaacttggttggctattataggtcatggtgggaaagagaccggccatgctgaacgagaatgccatctggggaagtcgcaggggtggcctctgctttgagagaagtggtaggggaagatggggatttggaggcgtggacatggctcgcgttgctggatgtgagcggggagcgcagcgatggtgtggctgatggggcgctgaaggagatgtcataaaccttcagtctgaaacactcccctatggcaccagcgtttttcattctttttaatcttttggacaggttataacaaaaagcggaaggtaggcggcatcagcatgtgttctttgcattttcccatacccaactgacgggggattcggtttgggttgtttggcgttttggggggtctagtctggtctggtatataccggtttttttttcatgtttttttttcacacacctggaaagctataatttgacgacgagctgttgtggagcggaaaaccaaagctgtgtgtgtgtgtgtgtgtgtgtgtgtgtgtgtgtgtgtgtgtgtgtgtgtgtgtgtgtgtgtgtgtgtgtgtgtgtgtgtgtgtggacaacaacggccaaatagagtgtggtatttgtatttagacaataggaaggaaagaaaagagagaacaagaactgagaggagctcccattagctctgatatcatcatcaacaatccctatcgctcgtgcgccttcgctcaaaagcaagcaacatttggaaaaagtgtgatgaacaagaaatgaaaacaagcaaaaagtagtatttccttgaaaaagaaaaaaaagatatcgcctcccttgatacctgagaaccctgccacgcaaataaacataaaacaaagaggtagcaacaacacccccaacacctccgccaaccaaccaaccgaaccccgaccaagccatagtcccccttatttacttacttcccttcccattcccaccctacaccttttagccatgttgtttatacatacttcctcaactgcagtccacacgtcagcaaacctgtctcaatgttttcagataaaagcaaaaagaggtactcacatccagcgtcaacgtctccgaactattcgcagcctggtccctatacacccccacaagactctcgctgtgctgaaacagcgtcggcttcaagctgatcacaataaactgcatccccggcccggcatgctcccggatgtactttgtgatcttttccacattcgcattatccagcgcggcgtccacctcgtccagcacaaagaacgggctgggctggtagctatgaatcgcaaacaacagcgccagcgccgccatcgtcttttcgccgcccgacaggtgctccatgtcccggaagcgcttgagcggcggcatggcgtggtacttgatcccggataggtacggcgtctccgtgtcctcctcgatgtcgagataggcttgcccacccaaggggtacgcatcactccgcgtgagatccttgtacacgtgtgtgatctgctcttggatgtggctgaaggccttgttaaagagctcgaaccgctgctgtttgactctagaaaacgcgtcgcgggcttctttgagggcggttttgctgtcttcccagtccttgtcagttgactggagccgggtcttgaccgactcgagacgctccatggcgcgcatgttggggttgagcttctcgagctcggtcgtgagggaagatatgcgctcttggagcttatcttcaaagtcatcgtccgagtctttgaggtcgtcgtcgaggttgtcaaagtcgatttcgatgccgtagtcgtccatggccgcctcgaggacctcgtccgcctcggcgtcttcgtccatgtcgacgtccatggcgtcttggtctttctggaggaggacgtcttcgttggggatgtcgtctagagaaccctgcttaagggggatctggatctgctccaacttgcagcggcgcaggagggcgaacttgccggcgctgttcttttggacgacggactcgaggttggagatttcttttagtcgggcgtcgatgtctttgcttctcctttggaggtcggccttggcttccgagaccttcttggtcttttcggcgtgtctggtccggacaacctctaggctttcggagagggcttcgagctcgtcttggtcttggcccatggcttcctcaatgttgctcttttcctcctggtatgactggacttcctgttggtgccgcttgagttgttgctccatgttctttactcgttcagtgctggagctgagctgtgacgtctcccagctcaagctgttttgaatgctcttcttctggatgtcaaatgcctggcgcttctgggcagcctcctgctccaaagtcccttgctgggcctcgtagtcacgaatgttctcatatccaagcctcttgcagaagtcggcgtagatcctatcttcgacgccctgaatggccttttcgaacttctccacggttgcccgggtacgctccagctcgcccttcttgtcgtcgaatttgggctggaagctcgccagttcctgcttcgcgttgtcgagctcctttagcttactcttaagattcttttcaaaggcagccaactcgctcttttgcaggcgaagacgctgctccagagaggcaatctcgttctggaggttatcctcagtgcctcgccgtcccgctcgtggcaacttggcaatgtcgtccttgaacttctcagccaaacgcgtgagattctcaacatcaacctgctcgaaccggcgcttattgcccttgtcctcattcaagcgaccacccgtcatggtaccggccttgtgaatcacgtagccttgcagtgtcacagccttgacctggatcttcttgccatagacaatctccttggccacctcgaggttgtcacagaccacggacccgccgcaggcataggcaatcgcccgctccagcgttggatcaaagtcgatggtgtcaatggtcaatctggcacccgcaatgcccttgacggcagagtttgaggtgtttaccttgatgttgtccaacggaatgaaggtcatggaggggagccgaccgtccttgagaaactggatgcagtcaacagctgtcttctcggtgtcgacaatcaccccgtcgaattcgcgaccaagggcagtgatgaccgcctcgtcgtacttcttctgtttcggcttgcaaagctcaccaactcgcccgcgaacaccagggtagatgcgtttgaggtcactgataatgttgcgcgtccttgtctccctctcattctgccgcctgcccatgtccgcatcttcgagtttcctcaggacgtcgcggagcttctcctcgagttcagtgtgggtgttattgatcctaatacgctccgactgaacactattgtactcctttttcttggcgtcgatctccgttgtaatctgcctgatgaagtcttgacaagcatcccggcgttctgtgatgacccggacctcaccctgcagtttgtcgatgctggcttcaaagttgtctatcctgccaccaagactgttgaatgtcgcctcgtcgctcttcaattgtcgtcgcagattatccagcttttgtcgattgtctgttgacttcttcatcgcctctgcttgcagcttgtcgtattctttcctgtccgcatcgctgagctccttgccctgcttcttcagcgtttcggcccattgcttctcaaactgtcggtgcgctttttccacttgtgacaagtcctttgtgtacttttgcacagccgccgtcttctcgtcgcggagtttcttgagatcggcaatcctctttcgtagcatttccatatcccgggagctctgtgtgatcttctcatcaattggtaccaggctgttttctctttcctcaatgctcttttccttggccttgatcgtcttctcgatcttgtggacctcacgggcaacgctggtttgttccttgcgcgcagcctccagcctcttttcgaatgtctcaacgtttcggcggaactccttgagattctcctggtgctcttgaatctgggcgcttgactcgtccatcacccgttgaaagtggtacagcttccacagaatgtgagtgataacggcctcgtccctttcctctgtcttcttctggaagttctcggcctccttcttttgctcctgatactgcttgatctcgccattgatgcctcttcttctgatgagttgaaagttttggttttcgagagcctgctcttcctcggcctggagtttctcgtactcggccttgtattccaaactacccgagatctgctcgatcaagcgtgtgaggtcctgtggtgactgcgcagcgatggcctcgacatcaccttggaacaccaaaaagttgcgcgccttgatcaggatgttctccgtctcgagggcctcgttgtactgctgggcggtaaccacgcggtcgttgattcggtactcgctagaaccgttgctcgtgatcgtgcgcttccaactttgctcatcaccggcatcatcttcgtacacggccattacccaggcggatttggggtcgtttctcgtcgctctttgcgaagagccatcgtcatcgccattctcgacgccgttggtgtggccattggtggctggtgcagctgtgccgtcgtcttggatcttcgaagttttcatgacccggccgcgataaaccaggtcgcgaaggtgcgacgatcgcagatgtgacgacttgatgccaaggacgaaggagatggcgtccatcgagttggatttaccagagccattgggaccgatgatggaggtgaagtaggagtcgccaaacaagagtgtgtggtggcccttgtaggacttgaagtctttgaaagcactgttagctttaacctacaagacatggccagcaggtatcacgtactgaaaagctcgaggcggaggagcttccccatggtcgcggtggccccgacacgcggagcgggatgttgtcgaagagtcgcgtcaaatggaggggattcgcaagggcaattgcgcggtcaaagggcccgtaaaaatagtggcgcgacggtcaggacgaaaacgcgcgcagaaatagatacgagaagaaaaagaagtgttggtgaagcagtcttcaatcgcgccaggaccataaccgaacggcctgaatttaccatcgcgacgggaagggcgccgttatggtgggggagcgggtgcacgtgccatatctgcctaaagggttagggttggttggcgctctgtagccatgtgtaagatgacggtctgcttgaagagcgagtgtagctcaagagctattctagttgcttaagagctatgctagtttctcaagagctatgttagttgatattgctttggactatggttggcgcattcgtgagcactacgctgtagacaagtaaggcaacgcacattgtattctgaaccataggtacctgacaaaaaagttaatctgcctcgaaagatagttcgtaatatgccttgaaagatagtcagtatgccttcagagatagtcaagaggcctatcaactatcttccccagcatagctcagaatatggatatttgttgatttgatacttttgcagtgccaattatttgtccacagcatacactcatgaagttgctgtttcacggagatgattgacatgtgaaaggtaaacatccgactattaatgcaaagctgccttttacttccaaatgggcactcatgtctggctacctgaatatggagtcatctgatcgaagcagagctgcgatgcaaccggcaggcaatttgaggtcgaaatggaggtccacctcgtcaaaggacgggaccgaagccaagtcctgttccatgatggtgggtgccgtttcaagccttctggccactgagcgaagcccctcagaacacgcccagcgctgcagccggtgagggcaggggtctgggggcctggggcagacgctaaatatgcagcaacaacgtcaacaccacctttctcctccgctttcttggttgtccaagtcaggtctggtggttgcatcacaagctgccaactctgcccacgacggtgtcaccctcaccctcaccttcaccttcttaactcatgtctgactgatttgttgtccacctgcccctctctgacgttgctccatctattcacttcaggcagcgcaccaggcaccaaagctgttccactttcttttagacccaacctctgcgacaaagaggccaccggccacatatctcccctccactcctcgactgaaatattggacacggtccgcgtttaaggatactttacagacattcgagatcaagaccgcaatcatggccgaaccagaagtcgcatcaactgacagcgaagctgtccctacaccagaaaacagcacccccctcgatgatgcctctcctctcgaagaacatgtcccctccatcgatacgccaaccctcgcgcccacctcccccgagtcccgtctctctcgaaacccttcattctccggcagcagcagcacctaccaagaagactgggactccaacttcccccctctggaccgcctaactgtcttggagctgctcgataacttcaccctcccgcaacagcttgagaaactccagaagggcatctcagcccagactgagaaagtgcgcaagtcccgcgaagccttcaacaccaaatcccgccaagcccgcgagcgcatggtagacgaatggcgccgtcgtgtcccctccgctgaagagcagctcgaccggtaccgcaagcgcatgaggaactcggtcgacaaactcgggaaacgatggaacgacaccaaagctatcaccctccgcgagaagatctcgttcatcttcggtgtcatgaacatttttgtctcggggtatctaatcggcggctggccagagtacatgcactggtggtacaccatccagatcctgtactttatgcctattcgcttctacacctaccacaagcggggataccactactttctcgccgacctctgctactttgtcaactttctcctgttgttatccgtttgggtctttccaaagagtaaacggctgtttacagccgtgtactgcctcgcatttggaaacaacgccgtggcaatcatcatgtggcgcaactcgctggtcttccactcgtttgataaagtcacctcgctcttcatccacatcatgccctgcgcgacgttgcactgcatcgttcacttaatctccccccaacaccaagcctctcgcttcccagcaatttacacaatcaagcactctcccgctggctcgccaaccgcttacgccaacgtcctgagcatgctagcctggtccacaatcccgtacgcgatctggcagttgagttactacttttttatcaccgtccgccggagagacaaaatcgccgccggccgcccgacatccttcacctggctcaggcaatcgtattccaaagtctggatcggaaagtttgtgttggggctcccggaggcggggcaggagccagcgttcatgtttatacaatatgcatacgcggtcctgacgatgctaccgtgcagcctgtggttttactacaggtgggcgagtgcgggttttttgggagtggtttttgtttggtcggtgtacaacggggcgacgtattatattgacgtttttggaaagaggtttcagaaggagctggaggcgatgaggaaggaggtggagaggtggcagggtgagcatgaggggttggttggtggcggcggggggagtggtcatggggaggagaagaaggttgggcttggggaggggattagtgggaaggtgctggatgaaaggagggagggggatgaggatggggggagtgggttggataatattccgctgttgaatgatgaacggccggcggcggcgatggttacggggttggaggttgatgatgggggggcgagggatgtggctagggagaggaggcaggggaggggggggatttaattttgttttttgaggagggaagggatggatgggtttttttgtttttcatttgtggtctcgcgtgtgtgtgtctggcgttgttgttgttgttgttgttgttgttgtggtggtggtggtggtggtggttgttgtggttgttgttgtgggaataggttagattgtggattttggttcgcgatatatacccccgcttcttttttattgacatgagagaataatgagtctgttgcaaaattatgtttactttcgatgagaatgtgtcaacgtgctgnnnnnnnnnnnnnnnnnnnnnnnnnnnnnnnnnnnnnnnnnnnnnnnnnnnnnnnnnnnnnnnnnnnnnnnnnnnnnnnnnnnnnnnnnnnnnnnnnnnnnnnnnnnnnnnnnnnnnnnnnnnnnnnnnnnnnnnnnnnnnnnnnnnnnngtcggcttcggctgggcctctgcgttcgttgtcgctcgggttgccgttttctgtgcctctttccctttttgtgtctgggtgccggatcccccgtataaaaactcgatagctggttcattccccttagtagtcttatgtcatcaaggtgcgttctagcatctttccctgtctcatcaccctgttgtttttgcaatttttgctctacccctttcatctaacccctccctttccttgccttactctttccttttcctttcatccccctcccctacttaaccttggccttcctaaactattttctcccccctttccactttcccagtttctcccgcccccattatcaagaattttttttctgctgtttttggttcgcggtttccgtggggggggggtgggggggggggggggccgagataggttacaatatgatatgcgttgacttgcattgcccactattgtatccagaccgtgactgggtaaggatttaggagaagatcatttggatgagcgaggttgccctcgacataaaagagcaacaacaggccaggttcatttcaagctcagtaaaaactcgggataaaagcatctgatcatggaaactagcaagataccctttcacttcgagccgaataaagactcctgccgcaatcacacacaccgactccataataaagcagagatgagaagcaaatccatttcatgcaaccacaccacctaccaccatcaacaccacccacccacccagctacaaagcgcaatcatgacctggtttccaataatgtacaacaaacaagccccgcttattcccccccccccaaaaaaaaataatgaaccaatcgccataacaatttaaaaaaagtcaattaataaacaacccatgaatcccgctttcatactctagcaagaaagaaaagaaaagaagacataacccaacacctcctcccaccaaccaaaccatgataaacaaattccgctttgttgaaagaaagatggcaaaaagagccccgggtattgaccaccacctcccatccagatgtcccatgttacccagccagctccattccatccatcaatccccccttccatatccatgatgatcgattgatccctttaaccccaaccgacccaccgacccaaagccaaaccagagacaccatcatcatcaacaccaccaccaccaccaccaaacacccaacacctttgcttttgattgaaagagttccgtttctcccccaagtgttgtcgtcgtcgtgtgtcatccacctcgtaagtttcgtgtcatggtgtacactaaaaaaaacctgtcagtcgcttgccccttccatatatggaaaaaggggaggagaaactaacaaatctcaattgagagaaaaagagagaaaaatccatctcctgctcgctgcaagcaaagataaacactttcttcccgctgattcccccgcccccaactccaaaagccacttgttcgtcgtctggctcaagaaagcatgtgaaagtcactaaccctttcacctaattaccccccactcctgcaaccttatacttcccccgcccccctccccatccacccccatcctcccacccctcttcccaaacacgttccaaaacctcaacgtctcgtcccccgcccccgtgaccaccaccctcccgtccgggctcatagccaggtacagcacccgataagtgtgccccgtcaaactcgccacctgcgtcatgctcgggtacttccacaccacaatctggttctggctgtacccatgcgtcgagacaatctcgtttgagttcttgctccacgccaagttgcaaacctggctccccgtgtcaatctcattgacaacggtccccctcaccgtatcgtggaaaatgatccggcggtcggccgtaccgccaccggaagccaacagtccacgttggtgagggctccaagcaatcgccttcaccgcggcggtgtggtccgaaaacttccacagtggcgagtccgagagcttatcccagaccattagtttgttgtcgttccctccactcgccagctgcccatcctcgcaattccattttagtccgcacacttcctgcttgtgcccgactagcttcctcatccacggatctggggctcgcacatcacggtggtatatggaccgatcccgcgagccagaggtgaggatgtgcgtgttccaggccagagcacccacacggttagtgtggcctaccatagtcctcaaccttcgctgccgctccgcatcccagatttgcactaggccctttccagttccgatggcaatgtgtgtgcccttttgtatccacgacacgctcgtaacggtgtcgtcttctaacgtgcagagcttgttgacgcgactggtctgggcgttccacatgtacacgctcgatcccaggccgacgcctaatacatttgcgttgccccagtcaacgaggttgaggtaaaagtcatctgcgagctcgggagcatccaacaccttatacggaaccttgctcacggcacgcggttgtcgccgtgggctgaggagcagttgctgactcccatatctcactggcgataagctgtacacttcggaccgggtgtccaagttgggcccgtgtcgactttgtggcgtccttgaaggtgttggatggcctgcaatgctgtgacgaggcgacatgtaggagaacagattcttgtgtggtgtggatggtgtcaaatttgatggcaaagatgatggtggtggcccgtttggtggggtgtgtgatctggtggcatggccgtgggagagcctgttgtgctctggtgacatggaaggcggtgacacctgtggtatcgaattctcaaacaactctgtccgcagcaggcgggagaatgtccgatttgcctcctcagctgcattcgaggattagctacatggcacacccagttgagttcacgggactcacttctctgatagtgaagctccccatgcggggtccgcttcttttgtcttgatggggtcgcgggcgacccatcttcatgcaagagactgaaacttgcctggaggtcttggccagaccgcgtgggaataaagctatgagcgaccagtcagcaacaagaacagatgaaaaaaaagtcaaaaaatcaacataccggtcaccgttgatcctttgccgtttcctactcggactagctccaggtgtgctttctcggtgctgccgaccgatttcccgccgcagcgcgtggtcgacggcatccagtccaatgtcggtggatcttgaactcgaccgtccatttctcgagcttccggcatgcgacggttccacctttagacgttcccctggcgggggaggcgtcgacaaccttggactggcggcggccgaactgtgtgactcctggattggcctcttcatggtgggagataatgcagcgccgtttgaaacgtcgccgttgatacccatgcttctcttgttttgatcctcagcgccccttttccaaattcacagaaattgattgccgcgcgggtttggcgacaggcgcgctttgcataggctggattggagtcggacgagaggcgggtgtggtgagaggtgaagtcggaagagtcggtcgcaggacaaagaacgcgcgattgttgcgggatagcgatgaaatgcgggggaaacagttttcgcaaaaagtgaatagtcgcatagacagcttttgtggggcgagcgatggtattgttgtgctgctgtgggagaagtcgcgatctcgtctctttgcttgtcttggggaacaacaatcgcaaggagcggcggggcgactgggcaacgggagctctcttaataggagacaacagcgggtcctcgtgtccgatagactcgaataagtggcagcgctacaaccacaatctcgcaaactctaaagtcgacagacaatcctctgcaaaggtagggctaccggaataatgctaggcattcgtcaggccgtgaggttgggagggatggcgtcgacagctcgaggtgtgtgtggtgatggaagttggcgaagcacagaaggccaaccctctgaaggcagagacggaagccctctgaagcgggagagcgcgggcaacaggcgacgggcgacagtcgcgctaagccgttgattagccgattccaaacaagcgagacccttgctcgaatgctcgaggggcacggaccatccaaacacagcagtgacctcgctgggctgcctgtggctgtctctacgctgtgaaacttggcggcgcctaaaacaacatctccagcttcctctcctccctggaattgccagccgacgccaggaatgcatacagctcacccaaatctttaccgtttccacatggccattcacgtgctttcctctaaaaacaagccccagcccttgattccccattgtctccccgtccctatagaacttttggaagctctcgtctggcatgttgtcccatgatgtaggtagaccccacactcagctactaggtcctattcatatccttcacatagtccgtggaggttgggatagcagtggatggctattagtatcaacctggtctggtttagcaaggtatgattgtatgctatcgtcaacgcagcagcacaacccctcatctcgacctcacactcaacgggtccgagtgcccctctgtgagcgcacactcaaatgataccaacccctccctataatctttgcgatggtggagtggggcactggagatgaggtcttctgacggtaaacacggagaggggaggtacggtgagagaaaatattgttgagtctttcgcgatgactgttttgcgtttctctctcgattgggcatgttgttgttgttgtttctgcccagctttcacgatggggggaatcctccgactgagtggctgaggccgttcgcgggaggggtgggccggccactcacaaccccgcctccaagcttggccgacgttggacgtgtcgtggacgggcatccgcgcgtctggttcgtgtcgtgctcattaaacccctgcatccatcttgttatcaaaccgtcaacaccatcgagtggatcgtcgtaaagggaggtcgcagacgggccaggagggaggtatgaaccgtttggtgttctgtttgtttccagtcgagtggggctaggtatactctggatgttgtgcagccactaaaacgggagtgttcacatgttatacagtgagactggacctgatcaacgtcgcagcataggcttatacttactctgtaccttctgccgcttgctgccaggtcccatgggcccagaggattccgagtcatcatcgtacatatagagatcccgaaaagaggttctgttggctgatgggagatgcagcccctccagcgtttccatcggtcaattccatctgccgagcaagcgctctcgacgtttgtacccgcatccatgttcccagccgttgaaccttatttcgctagtgcctgtcaaacagttagaatcgagtcattggctttcgttcttgcctctttttcgcaacaacagagagaaggggcgttcgttccgttatgcaggcagatacatctatcagcctgaggtaggtggttcagcgggaaggagcactgagcatggaatattggtcgtaatgaaactgcctgactttgcgcaactggcgatttcccttcacgtgcgaggctgtgcccagcgaagccaattcattctcatgtcgagagcatgtaggtttgaactaaccaacgtcagtaaattgaaatcgtcgacatgaaacggcagctatatgctgctacgctctctagcctgtgtgtgccttcaatagcgatcgagagtttaagattttgattaaagaccagttccagccggttgcctttaccatgtggctctggcccggttcggcgggctttaccatctgggcggattcaacggttgttctaagagtttcattacgaacagcccgactgccgacaggacaggggacagcatctcggaagtctctctctcgcgatgtgccggaaattccacccagaagctcctctcgattcttgaccacctcgcgagaatatacgggcccatttccgatggcacccgccatctccaggaaacaaacttgggcgcttccttctttccagacacaacaatgattctccagactttgtgggcaacctggaaggttcagtcccattcccagtaggctgaggggcctaaacaggtaaacatccacactccttatttcggtttctcttccataatgtggttcctaacctggcacaaccagtcaagaatgggaggcggattcagggcacatcgtatctccccagtctcatgtgttttccttgacacaaacagactcctcgaaaactgccgctttctccaagggccgaaaacaaaccctgccagtatcgacaggattcgtgacaagctagcagcgggcaaggagcatcacgaaaccattctcaactacagacggagacggcttcccgttcatgaacctcctcatgtgcgccccgttgctcgacagccaaggggtaacgcggtacaggattggcgcccagattctgacaacagcccagaaaccaaccctttttcaccccagcttgccctccgtcacctcgccgaggtgttgaccgccccagaaatcgaaattgtccgcaaccacggcggcggccgtcactcccccgcccacgaggacgaaacatccaactgggccaaacccgacgacaaccccatcccccgacccctcttccaatcccccctctcagccgacatggaagagctgtctgacctgtcggggggtaagctaacggggatctactccaactgcctcctcctccgcccctacccctccctccgcactcttttcgcgtcaccttccctccgtctcccagggatcctccaaacacctgttctctcttgcattggcgggtctgacagggtaaggcaggagttggagcaagggtttaaggaggggggggttgttgtcacggcaaaggtgaggtggttgacgaggtcagcggaggggaggacgaggtgggtacattgtacgccgctggtggggagtaatgggagggtgggggtttggatggtggttcttgtggatgatcaggagatgggggttggggatagggaagggagggggagggtggcgccggtggttgagccggggtttttgagggggatgacaacaagaggtgagaggggggcgggagggggggtatgatgcgattagtttggcgagtttgagtcatttggatttgagcttgccgcctggtcatcatggggagaatgggggggtatcacggggagttgagatgggtggggctgaggggtgtcgttgtcatgatggggctgtcctgttttgtaggaggtggggggttgagtcagtctctttggggcttgggatgaaatgatatcaatgtgttcaaggtaggatttgaatttaactgagaaaaacatctttgtcaatgaggttctgaaacggtatatgcgtttacaaaaggatagtgtagcagtgtatgcacagttggtgattggtccagatatttttcagtaagacaagtgagcagtggttaggtgtttaccaaacgaccgacattcaagggtttatttcatatccaatcatgtcaggcaagatctaacaaccctacccccagccatataatctgcagacaatcatgtgtgtgtaatgatttgtatattctctccccatcacatgttaaaaaaccattcgaactccccagtccagctagaaagcccaacccatcccattcttgacccaattccataacctggccttgaacgccctaccaaccttgtccaaccatttaccctttacaaaagaaatttcatgatgagagaaaaactaccaaatatcactccccctcccaatctcaatctcggcataatgtctattccccctttgctgctgtgccggctgctgtgccggctgagacgatgatccgcccgagaagcgttttcttctgctcttcttcccctgttcgtgtggtggtaacccccccgagctgggctgcgatcctccccctgaaccagacaacgacctctccctaaaagtccgtttttcttggtggtggtagtggtgatgctggtggtaatactggatgtcgctctcctcgtaactttccatttctttggggtggatattgtcgtcttcacctgatgaggaatcatcgtcgtagatttgatcgtgggggttgcggatcctcttgggtttggggtgtttttgcgggggagaggggaggttaggagggggttggtagtgggagggaaatgccaaggggccggagatggtggcgttttgttttccggggagggggttggagttggaggtggagaggagcagtttggggggttgtttacgggttgacggcaaggagggggaggtggtgttgaggtttaaaggggaggggcgttgggatcggggggttgggttttcgggttctttggggaaggtgaaatggggaaggggttcttgttgaggagggttggacggtggtgttggttggggagaagaattgcttgatactggcatgccgcggaccatagccctagggatgtaggctgggtgagtgggcattgcgctgccgggtccggagctggagttggtgcttaacggggagaaagggtaggcggccttttcgggggagtagctgtgagagctgctggctttgtgatgttggtgttgttgttgtttttgttgttgttgttgttgggggctgtggattttgtagtcgagtgtatatgacaccgcggggatggcaccaccgcgggagacatcctcatcggagtcggttcggtagaggtcgtcttctcggtcatattggcggtttcgtctccagtagagaatgaagaggccggccgcgccgataaagatggctccggatccgcaggcgattcctgctatggctccaggagtgaggctggtactgggctcggcgtcccgttgccggatatgggacgccatattcatagaataaactgctcgtgaccaagcagcctgttctattcgtagaggcaactaactcaactctccttcacccggcagtcccaaaatagaggacataggatcggggatatatcaggcgtgaatcctgcaagagagaggaagaaagcaaggcttgaaaagaaaagcagccactgggctggacatggttagtatacctcacttgagatggtgggggagatggccaatacagattacctagccctgctcatgcagttggtctttgctcgccaccgattgtaggcctggtcggtagcacagtacaattacttgacagtgagtaaacaccagaaagtagcaccgtccaacttacacgcaggcgactggccatccacagaccttacagcggttccatcactcaacatgagccagagagaagctcgctgaacatgccatctctgaccttgttcctcatcctgaattgctcaccttttccttggattgtacccagatgagacctcacactcgacgcactgggtcgttggcagcctcgaggacctcgctcggaaagccgtgtcgtccgtctatcgggcttgggggccagggcgacgacccaatcacgacaagcacagggaggaggaaaccgacaggcagtgtgggagggtcgatgcaaccaccgactggccaatggcgccacggtcagatttgtttcacgggcgcgtaaaactgctgacggatagtcccggacaatgctgaatggccagacaagcgaaacatttcttgtcgtcctgcgaggatctaccggtgtttttccccaggctcgaagaagagggagggtagccgtcggacctggcagtccaatgacagccagtggaagccagagctggggagagagggcgaggttgaccaaccgggagagatagttgagtggtactgggaaacaagcttccaaactgttgagctggtcttctcccgcggaaaatcatcccatgttgttggactcgttgaacggccgagaagagctaggaagaggagcaagagagctagcaacgggaggcatcgcttggctttgcccaagacaaagcttggcaggtgtgtacacccccggtgatcaccaaccttatcgtacgctaggctttttctcaatctttttccaaccaggggcatattttttgatgcaggacattcacccacccactcacaagacccgaagcaaacaacatcaggaccaacagcataaaggcaatatagtactcattcccagcgacgtgggttgaatatggccagtccctaccaggattctccgcatgacaaaatgaaaatggaggggcaggtggtgtcgactggagtgtgatgatcgcttcgcccagcagcagagaggtggccctccggcgcttggaaccgccgtgccgggtccgcgcagttctcccgacgggggaggattgccgaaaccgttcagaggcgcacccgtcctggaagagagggccaccaccacgagaacgccatgcggccgccgtcggtcttgtcgagaacattaacgacacaccgaatgttgaaaagatcacctggcagactcacaactgttgaaggttgccacttggctagatgatagccgctagaagggaagctgactgaccatgattttggaggagcaattcttctcccgtaggtctagaacctgaagctgccactgatcatcatgccagattccaagccaccactctgaaaggacccttgcagctgcactcagaggtgtcaacaccgtgtgcgacgccatccaagacctgactttctcttctctgccgaaggagaaaaggggatcagcaggtttcctggcgggggattctatctgccacagactgaggagcgcagactgagtcagtgatactgcgcatccggacctaaagcaaattgctgctgtgtttcctgcagtgcagtcagcctcccagcaatttcgagcatctactcctattgatggccgtttgctgttcagaaatgatcaccaggtctgttgactgcggtccttatacgactacagatggcagcaaacttggtatgtgaacgcaaacagtgccatgacagccacgtcaagccacaaacaggttattttctccgtttgtaatgcggtctggagccttgccggtgaggagaagtgccaggcgtacgtaatctggagatataaacatcgtgatacgccgcccggcaaccagaagtttcgcgaatgtcaaagtttccagctgaccggtcacaacgacaccgattgttaacaagattacacagccattgtcgtcctactgactctgaacaggatcacgatcacagcaatatcaatcagacttggcgagacgaactatcatctaccaggctaggattcgagagcaaacattttgacaatgaaggcataagccttgtacacagcagacggcttgaagcctcgccacgagtctctacccaaaacgcgggtagccacgagctgatcaacaccctgacttggatcgagacagccgaatcaagaatctacagtataccatttggtctcaccgctgggattacgtgtattttgaaaagcgggccagataggcttggacacggttacagacagtcaggagaaataagacaagacaatgaatcagatcttgtaccatgggagaactggcatacttctccactgtcttggatggaaggcctatatcgtcactattttgccacactcaatatcacatcatcgaggacacagagcggcagaggcaaccagcaaaggggttcctgttcttggacagcacgcgagacattccaacggttctacgtctgaccaggcccatgagaaaagtcagccgagcttcaacaatcacactacatgatgcaaggatgcgatccaaactaaaggcagtgtgcctgtttgctccaccagggccgttacatccgttgtcgacacgagaatatctccggcgctgaggaagactatgacggcctcaacgtggtaaatcagtctcttctgtcgtcgacgatgggtataaaatgcccgttgctaacatgtctcccacagtaaatcaacaccgcactcagatcaccaacaagaaaagcaacaccacagcaccatgcgtcacagcaaagctttccttcccctctctctagcctccctaggagcagcagagatagtcggccagtggacagcctggtccctcgcccgcacctgtacccctgaaggcagctcctgcacctaccacctcgtcctcgtcccaggtccggaatccgatttcatcacctgcaactggaccgtcgactctaccagtaacttcaaacccgcgtaccaaaccgactttgccgaagcaaaatgcggagacaacctttccctaaacgggggctggagcaacatggggttcatcaccatcgtgcccaccgacaaagcagccaacgtctacgccttcttcggcttcaccgacgccgagctcgcagacgggcaggttgcgtcatcaagacaaagacctgcctaccgagtcggcacttttggcgagaaggagcaccctgacctggggctgggtatgtcgaaaaagatggtgaggagactaagccgtggtgttgtccagcagcacggcggctccttgtcatcatccaaaccgacaaaggaaaagaggcgggatataaccatgagtgatcaactgcgaaagcacatctcggtgacgtatgcctccagccagcagcaacaatcctcttccgagatcgacacctgcagccaaaactgccagcctagcggggatgactacgacgctcttgcgtgtgtcgagacttgtcgtcagcagcttcacgggccaaagatcaacaaaggccaggagagacaccgcctcggcacccgtaacgacaacccagaaacatggcaaatccattccctcacccgccgtaaaccctcccacccccaagtttcctccccctaagctaaccctgttgcttgttcgcagtaaccaaccacctcctcaaccgaaccctgttcaccttctccctttactccagcaccaccctccagctagcaaactgcagcatctcaatcccgtccgtagagccaacccacagctggtacggacagcgctgtgacaaggatgggaagttcagtgttgggtggggatacaaagcagatacagactcggccgtgatgacggtttgcgagaggggacgggggatggcttggttcgggtgggatggtgttgctgagagggacctagacctggtggaggtcaggtttggggattcgaggggggaggtggtgcatgagacggtttgtacttgattttttttggggggggggaatggctttgggggaagggggtggtaatgtcttcgctgggggggattgtcggggctgggaataatgataattagttgccttgagatattgttttagcaaacaatacacttgcttgttgacatttataaagtgaaaagaaggaggttgttgttgttgtctgctcaggttgtacacctgtacttacaaaattacacatcatcccattttgttcgccttccaaagtaggtacatcaagtgtaataaaaccacccaccaaacatgccccccttgccgtgcgccaaattttccacgccccaaaactccatggaacaaataaatctcgggtatctatctacctcccctacctacgctcaaacctcttcggatccatattcaacctacacaacctcaccacacatccactcaactgcagcaacgtctgcaccccctccaaaaccttcatatgcgtaaacccaatctccttgataaactccaacttgctatgctcgctcaacgtctcgattgtcttggtcaccctaaacatcgtcgagataatatcatgactgctgtaccccaaatcccacagctccctcaacgtgtcaagcgccgagtccacattcccctcataacaagccttgagcatagcctgcactttgatcgggtgaggactgtcgacaaccttgaagacattgtcccccgagacaaacccgaacccagcccacgtcgactgcaggttgttgatcgcctggcgcatatccccttccgcactaaacaccaacgccgcgagcccatcctcgctgaacttgacaccctccgcatcgatgatttgcaagaggcgtttgacgacttgctcgtctgttaatttcgcatagcggagaatggcgcagcgcgactggaggggttcgatgattttgttgctttggttgcaggcgaaggcgaacctcgtcgtattgctgtaaatctccatcgtccgtctcaacgcctgctgggcaccgctcgtcatgctatccgcttcgtccaagatgacaagtttatgtctcccttgcgggagggtcaccttcttctgtgcaaaccccttgatacgctgcctcacaacatcaatacctctctcgtcagaggcgttgagttcaagcacggcttctttgtaggcgtccccgaggagttggcgggctagacacaagacggaggtggtcttgccaatgccgggcatgccagagatgattacgtggggcatgttgccgtcgcgggcgatgatcttgaggcgctcgatggtttcggtgttgcctactacgtcgtcgaggaaaacggggcggtatttttcgaccctggggggttagcatgttagccatttggaagaatagagaagggagaattcggagacataccatgggagctcgtaggttgggttgccactggggttggctgtctgggctttgtaggctgcggtggaggactcgccgttggcttccggcttttttgtcattgcggctggcattttggctgtggtatttttgttggtctcgacttgctggactttcggtgagctcttgagtttttcggcagttgtgtagcaggtgatttgtgctgaaaagtcaagggttgtcggcgacgttcgacttttggaggttgaagccagctgtgggatcgaattgctgattgggagacgcgacgcgtttgaaccgcgttagcttaaagtggtttttcaagacgcaggtaaaccctaacccttgaccccttagttcaccaccaggcagcaacaatggacaatagatcttggaagcagtcacggtatgttcattctcatttatttacattatatggtataggtctagatttccagatgtctaggttcttgcatttatgtgcggtagtcaccgttgatggtgctatccaggtcagctgatatcagtgcctgagaagacaagggaaactcacatgtactcatgactgtagtcgcaggtccagtaagtggcttgcttgtcgccagttccgagcctgaccaaaatctcaagatcctcgagctccaaaatctcagcagctctcgcctgtaaattgttagtgagcccttcccaattcatgaactcactcaactcacctcatcaacctgctcaggctctccgttcaccaacagcttgagctcagcagtgccatcagtgggcacgaacgagacattagtattctcagggacaatctcaggaacatcgttgatgggctcgctaggctcggaaatcagggagtagccggtggcgcacagaatgcggcccctatcaatgtttgtcaagtctcgtcgtcacattccaaacagaccgaggaaacgtaccagtttgcgtccttgccatacaaggcagtcttgacaagtggcgatctcgcaatggtgctcgcaatcttccgagcagcctcctcgctagcggaatccaccaccttgattgtcacaaacttggtagcaccctcaccatcacgcacaatcaactgcgccaactctgtagagaacttggtgagaacctcacggaaggcctcataatcaggtgtgccctccactacctcctttcctccagccataccgttggccaacagcgcaacagtgtcgttggtcgacgtgtcaccgtcaatggtgatgctgttgaaggaacggtcgacggcgtgcttgagaaccgatggaagagccgacgacgagataggggcatccgtggcaataacacccaaaagggtggccatgttggggtgaatcatgcccgctcccttggtggtacccgctatcctatactccacgcctggcgaggagggcaaagtaaaagtgcgggagatgagcttggggaaggtatcagtggtgcagatggccttggccatggtgagccagtgctcgtgggacccgcccaaagcactgtgggcctttggcacgttgttgatgatcttgtcgatgggcagcctctgtccgatgacaccagtgctcatgacaatgatgctatcactctgaccgaggcacttgtcagccgcctgagccatcttggcggcatcctccaaaccaccctttccagtgacggcattggcgcatcccgagttgatgaccaccccctggatgcccttatttcccttcttttgcaacagagcacggctgaaagtgacgggggcggcctgaaacttgttcttggtgaagacggcggcggcagcacatggtacttcggatgtcaagagagcgagatctggttttgttgtgttgctgggcttaactccaacgatggtgcctgacacctggaagccgagggggtatgtgcctgaggttgggatgtacttcttcttggccgcggggatggagctggacggggcagaataagctcgggatgggatgtgagaaaaggaccgaaccaattgagctttaggttgcctcaattggctcaacgcacatcgactgaagcccaccatgactgtttccggtttcaaaatgaaggggtacggaggggggatgtgaagagccgggcacctgtggtcgatggggttgcgtgagatcttatcaaagcagtgagagcccaccgccgaggtttggaaaatatctagggcggcggtaccggagctgggtccagacagcacaacaagatggaattgccgcaagaacgatgatgccagtctctagtataacaccagaaacataagatagttgagaaaaacaatgagatactctgagttttggacagcagccatgaaaatctcttataccacccctcaattgagtcactctttcaagaccctgacgaccagagctccggtctggaaaatgtttatcgataactgcaccgtcgcttcagtgctctagccacagcgccctccacgtggctgggcccccaccaaacgggtgccgagccgggccgggctgtggctccagctctcgttccccaccaaagccaacgacctccataaaaggatttcagattggtgcaactttcctccatcttccattccctctcaagctccaaaaaagacacgaatcacatttcgtgccttgttggagccgcatcatcactttcccagcccgctgggggctttctttcctttctcctccctcttcccattcacaacctcctccctcccccaccacctgcagatcatgccccttgctttttgagtttacgacccggagagcttcatttgaaaatttgaagtcgctcttcttttctttgttcacacatcacttctcacacaccacaccaccgccaccatgtcggacgcgatggatgcctactggcagttacagccattggcgcgaacactcgcgaccgccatcttcgtcacgtcgattggagggcatctgggattgatcccaacgggctggttgttcttccactcctcgctggccatcttccatatgccacctcaaatttggcggttcctcaccacctttctgttgagtggtccccagctgggcatcatcttggatccctacttcgtctaccagtatctcagccagattgagtccgggaaccccaaattccaacggaaggaggatgttctctggtatctcataacggtcagcggcttcatcttggtaggtccctctctttgcgcattctgctctcttcacacaacacacaacgcaaaaacaccctcgaattatctgcccgcatagtgctatctcccccaactatagcggttcctggaatcgaggaagatcaccctcgtatctcggcccggcctcttttcctttacgggtcggttcgcggtgcgggcatgggtggnnnnnnnnnnnnnnnnnnnnnnnnnnnnnnnnnnnnnnnnnnnnnnnnnnnnnnnnnnnnnnnnnnnnnnnnnnnnnnnnnnnnnnnnnnnnnnnnnnnnnnnnnnnnnnnnnnnnnnnnnnnnnnnnnnnnnnnnnnnnnnnnnnnnnntgacccgagcatactcaatatgttcggtgtggtttttacggcgccctacattttcttacctggggaaattcgacttttgttgcccgacatcgtaaacggacagctaaccgtaaacacataatagctgttcacccagtgtttcctgggcttccagccttttctcatcagcgccttgattattgctctatgctacacggcctcgcaagattcgcgcggcatgaaggccaactttttctttttcaccgtgccagcccagcttgttccgtattgcatgctcggcatgtccgtcatcatgaaccctgctgctctgccccaacagatttgtggtatcttggccgcccatcttcacgacttcttagtacgcacctggcccgagtttggaggcggtagaaattggttggccactccagcattcgtgtctcgactcgtcaccacgccgagaattctccaacgcgagtacggcaccggatttcgcccacggacccagacgtcgggcagttctacgggggcctccgccggctccgggccacttcccgactcctggaagacaaggggaactggccatcggctgggttaatggatagaagacggggaatgtacgaatacaaaataatattagaccagttcatgtcctgtggcttattcaggggtgttatcatgtccgttgtttgagtgccgatagtagtgccgatagtcgtgcctgtgttccttgatactcgagagatgaagcccgagttatggctgatacctgcttttctaaagacgtggcagcgcaggctcggctgtatgtcgagacactcagacttgatggagtctttttttgttctgagacaaggacgcctgttggttttcaaaaaaccaaaaaaaaaaaaatacaataatagttaaaatcacttagcatgcccacggtagagaacttgcttgtgtgaggctgtcaaccggagatttcgtgatagacttgctgccaaagaccggtcttgggctgttctcattggcaaaaaggagggaatgagtgggtggtgatgtcaggttgtaaaagcaaaaggcacgaaaaaagtgaagcgaagcttgggacccttcttgcccatacgactaatgaccccggtgagctgtgcctgctcgggccttcccaggtcggcttgccaaacacagccaccatgggtgcttcccatcacccagtcgcacccttggggagcaccgacccggccggacgtttcactgttaactccatttgagctacttcgctggaacaaggggggagggcggatgtatatatggtgtggatgtttgttggtgactgtgggggggggggggttggggttgagtgtttgcttggatcaaggcaaacagatgatggttagatatgagagatgattctgtgggtggttcttgggcgtgtctcttgtgaggataacgtcttcaagtcaggtattatttctcaatacaagacaggcatatatacaccttccctgagatctccattcatacatactcagcaaagtaaaaagacgaccgcactcttgccattcttccatccattggtatctctcaatagtcaacgaaaacttcaaaaatgcatcccgattttgtccaccccttgtctctccccgcccaaagaaaaaaaacgccatcataacgcccgccatataattcccatccatatgccgataaaagaaacacagccccctccatcattaccccccctactcggccgcaaaagaaacactcttcttcttcgtcctccccgcctgggtacccctcaaaacagcctccttgacaatcttatccccctcctcatcctcctttttcgtcttctccccatcacccctcttcctcttcttcctcatcaactccttcgtctcatccagcttagccttcctctcctgctccttcttctccgctctctgctttgcgcgcctcgcgaatctcctccatttggcgggccttgattaacttggactcgatctggccttctttctcggcttggactatggctaggattgtcgacattgattcctacatgtcttttttttcattagcccggtggggggggggggggatattgggaggggggtttggggggagggaaggggggaacgcaccctatcatcaacaaaaaccttccccttcttcttccctttgggcttggtcaccccaacggggtgatcatattcagctctgggatccctagctctttttcggtgtagacgcggggtttctttttgcggtcttggccgaagttgggtttggacttttgttctttgggggggattttgcctttgggggcacccttgccgcctgagggtttcttcacgccggatgaagaggatcgttttgggccggaggaggaggaggaggatttggagccggcggcgtgtttgttttttattgttcgggttggtgccattgttattgtcggggggttggtaaattggggggggttggttggtagggaatggatttgtcggtggtgctggtggtggtgatgatgcgcgcagggcgcaaagctggtctggaaatttttggaattgagagcatgggcagggccttatcggagctgggggaggttgcttatcggtttgattgggtggagaacaggggggtgttccggcaggcaaaaatgggtgaaaaagtggcgggaagttcgtccgttggattttttggcggggttaatttatctgggatttatcttatcggtttgttggtcagtcattgacttggtgtcgccgattgcgctcgcggaagttgaaggtattcgcggcaacacttgaaagtaggcatttacaagggtcttttttcgagtaagaaagtatacaaccgatcacaaaatggctactgctgaacaccctccccgctgggccgcttttgcgcgcgacaccaacgagaccaagatccagctttcgctgaatctcgacggcgggcgcttccacccagacaccgacgcccgtctcttcaagggccaggaccacgccagccagacgagcaagtcgcagaccatcagcatcaacaccggcattggtttcttggaccacatgcttcacgccctgtccaagcatgcgggctggagtctggcgctgaactgcaagggtgatttgcacagttagtcaccccccctcccctactcaaagggaactttttctgattttaaaatgtttcaaaacagtcgatgaccaccacacggccgaagacgtctgcatcgccctcggatacgccttttcccaagccctcggcacccccgtcggcatcaagcgctttcgtcgcctactgccccctcgacgaggccctcagcagagccgtggtcgacatctccaacagaccgcacagcgttatcgacttgggactcaagcgcgagaagattggggatctgagcaccgagatgatccctcactgcatgcaaagcttcgcgcaggcggcgcgcatcacgctgcatgtggatgtgattaggggggataatgaccaccacagggccgagagcgcgttcaaggcgctggcggtggcgattagggaggctatttcgagggttgctgggaaggagggggaggtgcctagtactaaggggacgttgagtgtttaaattcgggtgtatatcatgttataaaagcgagcataagaaatggagttttttgttcttggtttcgaaagggctggcagctgggaactgcgcagacaaagaaggacagggaggaaaccaaaaaatgtgcagaaacaataagtagaattgaacaagattctccattcaaaaaatgccttgaaaaaaaaaaggtcgtcctgaatttcacacgattttagctcttcgacggttgcgacggccttgggccccaccatttggcgggagtggtgtgatggattgatgttggaccaaacaccctgcccacaaaataattgggacactaaagtaggtaatatgccttcaaggatagtccataggcctttaaagatagttaacaggccttaaaggatcacttaaaagcctattacttacgtttaaggtatagttcagagtataatatgggttaactttactgtagtgtctcaattattttgtgggcagggtgccaaactgccgggaatagttcgaaccaatcctcctcgccatccttgcatcggaaacgcagcagccttacgagcttatgacgcagcgtgatcgaggtacaccgtgcttgtttggttgcagctcgtgatattgaagctcctgtttggtcattaacagaagttcaattttgggaagtggtctttcaacacgctggtcagggtttaagctcacatatcaccaacgacatcatcactcacggacaagttcagtttcaccaaacagcagccaagacacaacacactcttgataccacctatccccattcttgaagaccgattatctacccaccacgcgatctcaaaaactgagatcatttccatccaacgcaagagcaacaattagaagctaaagacctctctggcgaccaatgatgcccacctccctcaacaacgccaaacacgaagaagcggtcgacgcctcctgggccgcgacacggggtgcggtctctggcgcgctgaagtggggggttgcgacggcggtgctgggcgggttggggtatgctttctcgccggtgtacaggggtttgactattcagttcaaggtgtaaggtgtcccctccaacctggtgtggaatatggaagtgctgatgtgaggaaataggtacatccaaatgtcgggcatggtcctaggcagcatgctcgaagcggatgctaggctgagggagtatgaagcccaaatgaggctgcggaggaggctgatgaaggagcaggccatgtgggctagttttgaggagaggtatgggaaggaggaggaggatgattgatttttttcaggggggggggcgggaaagtgtatataggataggcggtgtaagataataaagtggtggttcttcttctctatgtgtcttttgttgcggaactgcggtggtcaatcaactgtacgatttctgttgttggttgtagggtgcaggtgaattaattgtagggaaacacctgaactcaaaaaccgattataaaaaaaagggtgaggtaagggtgtgcttttcatagggatatttgtgtatagcgatctgttcggttgatgatagaaatgctgttcaaatacagttggcctcctgacttggatctgtgcccccgatccggttatgttatgattatgctcctgcccctaatgccctggtcccaaaacccaatattcatgctactgtctccatgctccttaaaccaatgccccccccccatgttcatccccatgtatcttatgcagaacgaccgtacgcgcctctctttcccataatccaaagacaaaaatcatgaaactaaacgactgacaactgccaccatgaacgccccccctttttccatgctttccatcgtttacctataggtacagccgtaatacatgatattatacagtccgttaatatacaatagttacaccaaagaagagaaaaaactaaaatctggtcgttacggtgagaaaatgcgagatctatctcataacaaagataaagtcgtaagtgaggacaacaagagagtgaaaacaaatcaagatatatactttggactcctccaccccccaaacccgctaaaccacctgctcccgctcgtcccaggaagtgacctcctagtcttgtgacccgctcccggcggaggagggaatgccccttggcccataggaggcgtcagcaagctctcgttgaatcttgtcgaggtagcgggagcggtgccaggagtgcgaggtctggttgttgtgcctagcgacgtaccgggtcggggtgcttcctgggcttgttgttgtcttcccccaccaaacgggcaggaagaaagtgatgttcctggccaacggcttggacggactgggggttgttgaattggaatgttgaacattgccttctgtttttaannnnnnnnnnnnnnnnnnnnnnnnnnnnnnnnnnnnnnnnnnnnnnnnnnnnnnnnnnnnnnnnnnnnnnnnnnnnnnnnnnnnnnnnnnnnnnnnnnnnnnnnnnnnnnnnnnnnnnnnnnnnnnnnnnnnnnnnnnnnnnnnnnnnnngaggtgatggggggtgatagagggaggggtttgttggaggggaggagggcggatttcatgcctgttgagggggctcggggtctcgtttctggttgcttttgttgtgcttgtggttgaggttcagatctttgtgttcgtagagggtggtttgtcagggatgttatcttcaatggggcggggattggtgaccggcttgagttgatgttcctcatgatgttcttcgggggtggctttggtggggctggaaagagggagaaccgggggttggatgttttccttggggctggtgaggttgagggagccgagaccggtggcggagggggaaggggtgctttggggggcttgctaggttcccatggtgtaccagcaggggtgaggtatgttcttcgtgctttggaggagcgtttggtactggctgtatctggatttgaagctgggacgggtggcggtggtgatgctggcaaggctggtaccggtggagaaggagcagaagggagttcggcgagattggaagaaccctttgatcgtcgacggtcaagctccgtggtggcatagaaccacagggcgaagactgtgtcgacactccggcggtccacggctctaggggagggcgttgcctttctaatttgtaccatttcgtgctccacgtgttggggttggggaggtgttactggcccgtacgtgtattcattggcgtcgtcgctttcgtatagtcccaagtcgagtagtgcttcggtagccacggaggaattggaaggagagtgtgatggtgatgatctcggttggttgaccgggacggtctgatattcctgaaagtgatacatgggtgcctctcttgctgtccctgaatcccgccgacgttgtttcctgcgacggcagaggaagaatataaaggcagcaccggcgagaaccaggaggattcccacaacaatgcctgcaatggcaaaccctggcagggcccccacagtagtcggtggcgagagagagggagggctggtattggatggacctcggactcccgtggtgaccgaagtggcagtaacagtagaaagtgtcgttctaggtccaaagtcgaccggcggcgttcgagactcgcagcactcgctcaggggaataaccaatgtcgtcgtagtaggtgccggtcgcaaagctctgaccacacgagttgtatgggataggtcagaacaggacgttgattcaggacttagacgagacgccacatgcatcttagacgctccatgagatcggaacaaaagaaacacggtccatctttggctgttggtggagaactgggggaacaacaggagatatagaaaagcagagcaggcaaccggcagctcatatacttgtccgagtgttctacaaaggagactcggtcctgcaactgtgagggacaggaattctgcctttgccctccaagctgccgcataaggtacgcggcatggcagtgggcaaagagaggcagtgccattgcgggtggtccatgacaccggggccaaagtgggaatagggaacagggtggtaccacagctgactacatccagcggcgtagacgctttgggtgtgtccgatgtcagttgctgtaaaaacacggtggaagcagtctttgctgatatgtgtttgcggcaaactctaagcgcctggcgcgcgcacctttaatgatggaggtgggcagacaagagttattggactcgtgcttcggactagatgtcctccaaaaatcaatatttcaaactggttgtacaacaccataacgcgtcaatcgcctacttaagcgcgcttctagaagccgcccatcgcttgatgaggggaaatcagaagactattgaggttgtgccgcaaaagatcctgcctcgtatgttggatgtccgaatctctccacaaagatgatgctgttgactgcagactctgacatctaaccctgagagagttggaagattttcatgcggcacagaagatgtagcgtgaaaatccggaggttcgccgccgcccgagttggtgatgagtgagttcatggggcagatgtggagagacgacccctgacgccatctccggtgttactctgtacttggtttctgaaggtatgacgcagaggctgaagattttagaacaggcgatgatgcctctctcagaatatcctcgctcggtaccggcaaaagggtaatccacaaaaagatcaacggaactctggagtgttctagagatcccaagatatctggggagagtggggggttcgacgccttgatttgccggcagcacctattttggcatgcagaaagggggccactcggcgcttattcagagccaacaccacccaagatctcgtggcagccctgtccctattgtcctttcttgcgtgctttggaatgcaagaaatctgtagccgcgggaaacactgcagttggttgcgccaaagtcggtagacggcccgttcgggaagggcttgtgtgtgttggcctcagttcgtccaggttttcggggttgtgttgccaagtcgtgcccgtgatgttctgggtgaagagcaaactgcgcctggttgttgtgggcagtgttagctttgtggtgtcttggtgatcagttctgaaatcaacactgtctatctagtgcttgtgtaactgggaaccacgccgagggggggcgcacaggtttagtttgcctgcacgttttggtgatgccgagctgtttaagtcggtgcctgacacagtatgacaaagccttacggtgacgatatgcgatcgacgcagtttcaactctgatgatggaatcaacaccgagaggaccttgcctacggagtttaatgccatcggtgtgttttgtgaagcgcacctatatggcaacgcaaatgagaagttgacactagttcatgacatggtgaacacgagagaagcaggacgtcgagagattgcgaaacatataaaaagaacagcagatgagctgtcgagcgagggatgatgaatttatcgccaaatcggtaggtgtttgctcgttgccatggcggcgtgggatgaagtcgagattgcctcgtgtgcctgagctgagatccttcggcgggatcccctagctgtttcgtcttcaactgccggctgcgacaagcaggagacaggggacaggagacaggagacaggagacaggagacggaagtcaatcagcctggcccctctgaaaggctggccttgctttgactttggaagcaccgcgcattgctgggtgatgctgtgcctcacactcggctatctggctgtctttggtagggcagacagtttgtggctcccgcgactccttactgcaccacacgcggcaaaagccaccagttcgaggatctgggtcgagagggtgttctgtcatccagagtgtctgttgaagatgacggcttggccgggttggtgatcatgaacgtctcgtctcgatgcgggccagaggttggtgcaagattcgcgtgctcccgtctgaccagatcttttgtgtggcatgacacagaccccaattaaagtgctatctatatccggtcagctataggttgctgtctgcagcaggataaaaatgacacttcccctcctgtttcttgcagactggattgacacgatgcctgaagctgtaaagtgctggccaggtagagacccattgccaagatggttgctgtttgaggttgtcgaaatgcattcagctgaaaacgagagagaaagcgacggcgtcggcaccgggggacgggacccaccaagggcttccgagccgagcggccccgccgaggccggtggtctcgggctgccaaggaccgaatcactcgcatcaacagcactggcgtttgacgggcatcggtccgtcaatttgcgaccaaccaatggggtatcgaatcatgaaagaaacggaaaacctagccccacttgatctgcccagattccaccacggcgcgtagccgaatttagcgtccgctgtcctgatcgcagaatgcacgtcgggagggaacgccgagaccccgctgaatgtttcttccatcatcacctgcactatcaccagcagctacttggattcatcacagcgtcttttgagtttttttctttggatgaacggcaggtcatgatggactcgaatccccgcaatgtggtacaagatgtcgtggcctgtaggacatggacagatacgctgcatacgtttcatgtaccgttcctacattagggccgggtccatggcgtcttcctccggcaattgcgagataccaagaagcaaaacgaatccttcagcttgggtgattcttccccgcaactcgacatcttgggcaagacataaacggactcctctttgtgtcacaccgtttccttcaaacagaacaacagcagtagccagcagcatgctttgaaccaaggtcaaaggtcacatctgcaaaacaccgagctgctcggcaggttggcggcgcttagggaagccatcccgttggctaccctctttccatcagcctattccaccgttttccccagctcggaacggtcgcccagaatagctcacgtccgcagcaaccatatatccccacgtggtgaacggcaaccccctgcgcctttggggcactgctgctgttcccctctccgttgagatcttgctggactgaatctgcttcccgtcttggtgcttgtgatttggaaaggagttgggatattcttccatttgcgacagattccacaatacaatgattgacgacgccggactgcaatgatcttgtttggttgtttaaaaacacagtattcgaagtgaccaccaggtcgacttgggctttccaattgagaggaggggcatcttccagcacactggcgccgcccagnnnnnnnnnnnnnnnnnnnnnnnnnnnnnnnnnnnnnnnnnnnnnnnnnnnnnnnnnnnnnnnnnnnnnnnnnnnnnnnnnnnnnnnnnnnnnnnnnnnnnnnnnnnnnnnnnnnnnnnnnnnnnnnnnnnnnnnnnnnnnnnnnnnnnncaaggcagtttccccctcaactctattgactgctttcccctcccaccaggaggtgcgtggagtatcccttcccacccaggacgtccctctgtcattgtcaccggggaccccggcgtcctctggcattttgcggcgcggcaaaggagcaaatcgccatctttggcaactccactgagtccgagttgttcagtcctcagagtgggggggggggcggagaatgctgatgggcaaatccaggttacaacttcaagtcgctacaacacatctctccctgtttggaacgtcgtgactctggaatcagctctctctgggctcgaactaccgccctgaaacacgattgcgccgttgtagtagggtatccggagaaggtggacgtgagcgcaagatggccagcgaacccagagcactacaactcagctctcatcgtaaaccgagatggcgatactgttggcaactaccggaagctacacctattttttaccgatgagacctgggcactccaagggcgggatggtttctttcggggcaatgtcgaaggcttggggaacgttgctttgggtatttgcactgacataaagtaagcctgctgtctttagtgagttctccctagacatttctaacaatgtctagtccatacgagttggaaacaccatgggaagctttcgaattcggatttcacgtcatggaagcacacgcaaatgtggtcataatcagcatggcctggcaatctcaacaggatcccggccaatacacccgtcggcctcacgagccggatctcgaggccctggtgtactgggttcagcgtcttgagcctctgatccgggaggatagtgaggaggagattatcgtcgtcttttgcaaccggactggtgctgaagacgatgtgatgtactcgggaacaagtgccgtcttgggcatcagaggaggggaagtttacgtgtatggggtcctcggacgtggagtgaaggagttacttgtggtcgacacggaccagcctccactcagcaagttgaccgatgcctcaggggtcgaggccgagaatccttacgccgaggaaaccgacgtcgagactgagcccatcaagcgccgtgcgcaggccctcgagatccagataccggccaaggagacgcccaaagagccaccaacatcgcatccgatcagcagtcgcatagaggctgtgtcagcaacccccaagtctgcatcttctgctcggttaccctggcttgcaccagctgagcctgatgcccagagtcccggcaacccccgatcacctactcgactgcagatacctgtaacaccagtgcgaccgagtgcggaagaattcactctcatcgacagcgccattgccgaagacattgccattcccacagcaagatcatcgcggactccaagcccggacctgaaggcagcatcgcgtccctcgaggctatcaataccaacgaccccgtggaagtttcgagacaaggccagcccttacccatggcaataccgagatgggtcgcagtcagctctttttggtgggggagcttgcatgacgccaataacaccgttcgaagttgaggagggctggttggggacacccattgatgctaagccaccaaactggtactggaagcacgatcactcactctccgccgtcaaagaggcgatacaagaggaggaagaggtgtcgccggggagctcctcaaagccaacccagaaggtgggagggcttgaaccagcaaagacacagcaagacgcctctaaagtccgagatgccacaccgatcgacacagaaccgccaaattggtactggaagcacgagccacagttgtcttctcttgacgagatactccacgaggaagcagaaggtgaacaaaccgagacaggagagagccccagaccggaacaagccgcaccgtcaaaacccactagtaccaccgtggcagaggatgtctgggtagccacacccatcgacaatgaagttccagattggtactggaaacacgagcaaacgctaccctccctcaacgaaacagcacaagaggagcctgaagaggacgagccagaagcaaaacaacaagaatcatccagaccacgccaagtctcagcagaagacgtctgggtagcaaccccaatcgacaacgaggtcccagactggtactggaaacacgaacaaacactgccctcccttgacgagacagaagacgacccgccacagaatgccccccaaccagccaccatcaccaccaccaccaccaccccagcagaagaagaagaagaagaagaagaagaccacacccccacccccatggacgaagaaccccccgattggcactggaaacacgaacagaccctccctcccctcaacgaggaacacccatccccttcccactcccaagactgggcagacctctcctctgtgttgactagtttcaagatacacccaaagtcagtgttgagcaactccagtgctgcgcaggatattggtgcggagaggcctagctcgcccaaatcgcggaatgcgagtcggtcgaggcagatttatagctcgatggagaattatgattgggagcaggggcagcagcaggcgagggggggtggtatgcaggtccttggtagtggtggtggtggggtgaggaattttttataaatgttgatgaattattttaaataattgagtgagtatgtgtaatatgggtgagggtgggttggtttggaggggagaggggnnnnnnnnnnnnnnnnnnnnnnnnnnnnnnnnnnnnnnnnnnnnnnnnnnnnnnnnnnnnnnnnnnnnnnnnnnnnnnnnnnnnnnnnnnnnnnnnnnnnnnnnnnnnnnnnnnccgaggatatcattaaaccggctggactttgtcgaatctgtccgtgtgacggtgacgatatcacagtccgagacgccaagatgatgggatgggatgcgattcgccggtgggtagagtatgagagtttgagtatggtatcgtgatgggagtggacggttgggagggagtaagaggagtttgttgaatgaggagtggaggggaggaggggtggagggcgcgccctgagctgattatgaaatatttttgaggggttgataccatgggagagatagcgctggatttgtttgcagattatgtagccttgaagtgttttagcatcgagtttaggtgatttcgagctgtctttgccagaaatgtgaattgtttgaagaacgtccattcatccatcaaattctccagatcgagatgcgaccactggtaaaaatggcaagtaaggcaatgtcaaacttgagtttcgacaactatgtccttgatagcaaatgccggcaaggctctgcccttcatcacgacaataccacttttatagtgcttgtgcaacacccaacaaaaagcaaagtcagcatcatcttgtttatgtcaccctctctcggtttggcaaaaaaaaagacagctccagaccacagataagaaggatccagtggcgtgccctggccccctccttcagcaacagcgggccgaaagaatgggtgtggtgggctgcaaaaagggggtctctatggcttgctatgtaggttggcaagcacatcataggtacatcggataccaaccaaccaggtcttatcatcaacgtgggagaaagagcgataagtgtaaacagccaaccgcaccgaggccaagtaatgttcggcagtttttgaagcaagcagcgtcctgtgatcttgttgcatacaatacctatctgatcttgagcagttgttgacaaactaagatcttgtttacttgaccgctgacatgaggactaagtatcaccaaggaaggtcgaaactgccgagatctctcaacattctcacctacctaatgtacagaccttcacactgcattgtgctgtagttatgggaatgtgttgtgtcgctttcaagcgccatcccctcatttgtctgatctgtctcatgaccgtcaccgtcacagccatcacacagaaatccagcctcgttttcccctgaaaagagcacagacggaagttcggcagcgagaagaaaaggggggggaaacccgacagtttggttttgccgctttgattgggaatttccccaaggtggtgcatgttctattgggcgggatggggggattggggaggggggaaccaacagatggataaccaaggaaaatcaatctatttgacagtgtgcggtggttgatgcgctgcatgcatgatgatggagctgcggatgatgaatggcttgctttggtggggatgggataggtactgtagggaaaaggtgagatgatgcacaagaggagacggagacacagattgtcattaccagcacaacacagcagatgtcagttgatgtcatgttgctgggcccgagagatgcgcgggcccaagagatgcacgggcctgccagtgggtgaatggatggccaagtggattggtggtgaagtgctcaccggattgagagaatgtgtgagagagatggttgggttcttgggggccaaagtttatcaagagagaacaactttcagctggttccctatcgggaaaagagtgggccacgggtaaaagagcggtttgccaatcacgacgggcgggttggttgaactcgcaggggcccttgcatgggcagtgaccacttctgggctgtgaatggtcaatgctgctgagcacatgcattgctagcgtgcgaccttgggacggcacagcggctttggcatttctgagagagtgacgatcactctgtgagcattttcaaacggtgcaagacaacccccaatcacaccaaccatggaggttgaacccccgcccgccaccatgggccacccttttaatgcgttgaacaggaccccggaggtggttgacggctgagtctgatgagtgggaggtgtgtccagctcggtggctgctgtctgtgtttgtgctcttgtttcccttcaccaacaacaatccaagtctcgtcactgtcacatctgcaaaagcacaagcttccagtctcttttcctccagggacccatccagacaaaagtgcgcgcttaacctgacatcccgaagatcgaagcgcgtttctcctctgttttactctataataccgtcatcgtgccaccaggaaagaagagaggcaggtcggaatgtcacacagaaaatctggccggcaataaacgtctattcttcccgttcctagctgctgctgcatcctccccgcacagcaccgcataatacccagtacccgaaaggaataacgaaggacgaaagacggcagaacccagcgagcggttcatttctgcaactgcaaccaaaccacataaaccacataaactcagacgccacgcatcaccacaggtcagagatcatcctcactgctcctccaaccgtgcgcgtggaggagggctaccagaggcaggatgccgtccactgctgctcgccttgccctcgcggctctggtgacagcaacgacctcaccgctggccgccaacgctctgctgggcacacctggatcaccatgcgagaagcactgcagcaaccagcaggaccacacggcgcgggatgagattgtttgtgataggggcagcatagggaagacagcggctgggatagtatgggagaactgcatcaattgtcagctgaggagcaactacacatctgggaccatgtcggatcaggctgctttgctttgtacgtctcctccgttttccttctcaccaacatgcctatatggcaagactgatattaacaaatcttagacaaccttcgatttgccatggacacctgcctatggcatagtggcgacagcacaccatgcaccggatcgtaagtcaacaacccccctcccccctaagtgtgcctgggctttgcccggcagccacgccgcaatcctcccgtatgcctccgtgctgacagcgcctcaggacagcatgtggtccgctggaagatgccgtggagtttcgcaggaatgacacttccggccgaaccccacacggcttctgtgacctatgggaagagaactttattcctcgatgctcaccatgcctagttggtgaacagcgaggtcgcggcctcttcctcaacaactacctctggatcctcgaggctgcttgcgaacagaaaccagatccaggatataccatcgccatccaaggcgaagtctttggtgaaaacaccgtcaccatcgttccaccagaaaccaccctcgtcggcgtcccaacaccagattatggccctgtctccctcggcgctagggtgggcatcgcctttggtggcattgcgcttcttcttgttctggccggcttcttcattgtctgcaatggcaagagaagaagacgggcttttttaagggagctggaaaagcgccacgcgcaagcaaaccacaggtatggtggcggaggaggtgacatgtttgagacaccggttagtcagcgaccacttagggggtgggagaatgagagccctgtctctgcagccaccgaggcgacggaacggacactaccgcgatatatctcgccatacacgagcacctacaacagccccgtttctggaccaggagggtcggcgacggtagcggcaaactggccgtcgttgtcaccacagcagatgcacagccaacgactggatcaattattacagcagcagtcacctgcgcacgggtccccgccaccggcttttacacaatggccttcggttgggcaggagaagatggttatgcagacgtatacgcagcacgagaagcgacagaatgagattgccatcgggcttgcgctgggaggggatgaggcgagcttgaggagcaagccgtcgaatgggacgatgaataatgatcggtatgggtacccggtggaggacaaggggaagcagagggatgaggtgtatgagttgaaggaggtggaaagtccgtataatgggcagggtggggaggggatggtgcatgggagtaataatccttattatcagatgccgagcccaccacaggcaccggtgctgcaccaccctggttatgggagagcacatgggagtcggcctgggtcaggggataagggggcgacaggcttggggttgcagagtgtgcctgtctcatgatggagagagcgggggtgtttttgttggttttggttttgaactgctttgagctataatacccgccccctgagacgatagggtgcatttggagttgggttttgagatgacgggttttttgttggggtcttggatagtgtataaggttggatatgggtatatatttgcaagaaaggggtcggtacctcttccctgggatgagtagacaggagatactaccaggtattatgaaggtgctccagatgatgctgtctgtagagtttagccacgatattatcacatcacagttgccacttctcaaccaaactgcccatcttcatgcacccacaggatgtgattagactggtagtcacacagaggtcttcagggggtgtcaagacaaggccatgctccagatgccggattctgttgtcgagtcgctggccagtgtctaacaacagtgacaattgatgggcccgagcttctctcaacaccggatatctgcatatctactcacgataacagggctcgaagccacgccatgcctcatcaagttagcgcactcccgccaagccagacagttccccacattatcttttttggccttcgtaagaaaaattttggagagcttcactctgagctgcttgctttctctcgatcgcttcatctcgaccaacaccacggtggacaaatcgtgcggctcctgaagaccctccctctaccagacagccgtccgaatcgtgagcccttttattcacggaccacccatatcaccactgttttctttttctcaattcacctgtccccaagtcgcaaatccagcgcgtctagaaaacagatacccgactgacattagtccccgctacttcgtcaccaacaacaacaaccaaaacaacaacaacaccgatcgcgagttgaatatatcgaattgcgatatcatttacgatgtccgtctccaaggatgtcatcatgccctcgtcggctcccgctccccctgtgaacgacaatgagctccccctccttctgaagggctacaacgacatgctcgtccgcaccaaccattggactcccatcccctatggttgtgccccccacaagcgcgatatcaagtcctacatctccagcggtgtcatcaaccttgacaagccttccaacccttcctcccacgaggttgtcgcctggctcaagcgcatgcttcggtacgtcgtgtgtaaaatcgagaagagagatggttggaaaaagcggctaatggaaaatatgttgtagcgttgagaagactggtcactccggtacccttgatcccaaggtcactggctgcttgagtaagttggagaaaaaagccctgtgcgattggatcggtgggggcaaagttactaacatggtgggaaaacagttgtctgcgttgatcgcgctactcgtctcgtcaaggcccagcagggcgctggtaaggagtacgtttgcgtgatccgtctccacgacaaggtccctggtggcgaggctgccttcgctcaggccctcgagaccctcactggtgctcttttccagcggccccctcttatttcggccgtcaagcgtcagctccgtatccgtaccatccacgagagcaagctcattgagttcgacaatgaccgccaccttggtgtcttctgggtgtcttgcgaggccggcacctacatccgtactctctgcgttcaccttggtcttctcctcggtgttggcgctcacatgcaggagcttcgccgtgtccgctccggtgtcatgtctgaggacgatggcaagcttgtcacgcttcacgatgttctcgatgcccagtgggcctacgacaacggcggtgacgaaaccctccttcgcaaggtcatccaccccctggagactctcttgtgcacttacaagcgtctcgttgttaaggataccgctgtcaacgccatctgctacggtgccaagctcacgttgcccggtctgttgagatactccaaggacattgatgtgcacgaggaggttgttctcatcaccaccaagggtgaggctattgctattggtattgcgcagatgagcactgtcgagatgtcgacctgcgaccacggcgtcgtcgccaaggtcaagcgctgcatcatggagcgcgacctttacccccgccgctggggtctcggccctactgccattgagaagaagaagttgaagtccgatggcaagcttgacaagtatggccgcgccaatgagaacacccccgctgcctggaaggccagctaccaggattactctgagtcccagcagggcgctgaggctgccacccaggaggctgccgcccctcccacccctgtcaaggctgctgagcccgctgctgctcccgccgcttcctctcctgttagggaggagaaggaaaagaagcgcaagagcaagcacgagggcgagaccgccgaggagaaggcggagcgcaagaaggccaagaaggaaaagaaggagaagaagtccaagaaggatgctgaggatagcgagtaatggatttttgagatgctctgatcttctttttttctctgtcggtttgcacacacaacctctgggcgtttttatttgggggctggtcaaggggaaaatcggagggcgttttgggagtttttgtcctgtctgattatcatggcatacagcttgttggggtagcacgttatgcattatacctggagctttgcgagttttgtgtcgggggtggcggtggatgtctatatagctgtatgtagtaagaatggagagttgtacgatatatttagggtgtgatgggaatggttgtggctttgacatgagtgattgtttgtggtgtcttgacagcatctccaacaccttgaagttctcaactccaagcataaccatgattttgtatgctccatgctgaatatcttcttggagatttgcagccacatgatttacgattgttgactatgaattgagaatggcttcatatactttgaatgcggcttgacggaacatcaaacaaacagcgggtttagctcagttgggagagcgtcagactgaagtcaaaacttcatttgtatcggttaaaatgatatcccgagaaattgggtatcagaaagacaatctgaaggtcgtgtgttcgatccacacaaaccgcactgttttccttttgggcattttcactacccaaggcatgtttgactttttgtctttgggaggtcttcagtctatatgttgagctctttagctcaacatgtcaacttctggctcggcaactcttacctgcccgctgggattcggaaagagaggtcggggtttcatcacggcatcatgccgatgggtctttttgactttggaggcgtcacaatactcatgaggcgtgagccgaccgagctgtgcagttgacgacgggtgagctaggttgattagggggagggcaatggtgttgagatcagcacgagctatggggttgttagtgggtttttggtgtaaagtttggatcatgggggggagggggagtggtattcttgagcttgagggaaaggtcatgaaagtactatgctttccaggcttacagaggcttgatggcattttttccagtgaagagggattttcactgagcactgaagatcctgcacaatcgattgggcgactacgacacgacagacgcttcctcatctcaaccgtccccatctgtgcggttgccgaagagtacagcttctcactttggtaagttgcagctccctagcgcgcatatacgcaatccccaatacgatttcggacagtagatacagtccagattgggcaagcaaacagaagaagaacaatggaagttcttgtccttctgaaaggactttgatcttatcaagataccttacctacttttctggcacctggcttttcttgctttgacctccgattctgactgacaataatcacaacccctttccagcctctttttttttttttttttttcttgacacaggcatcaagtgacaaagaccctctgtgcggccgcgcagatttttacgagaggatagggagagggttttgtgatgatgtcaatcttttgagaatttctctcttgtttcttgaaacttttggatattgttttctttcctcgctgtcggcttctgacgatcttgtctgattgctaggcctcctctatcgggagagctgagagacggctgctctgcttgaactatagccagccatcaaccggtttgggtccgaactcaaccctttttcgccacacacctcttttattaggtttctagagggtaaacaaacaagagcatcatgctccccacgctcgttaccctcctcctcctcctccacctctcgcttctccccctcgtcaccgcgaccgcatccccgttattaaaccgtgattttcccgtaagttgaacccccttccccttaaaccccctgttcttctataggtaggtagaccatcctaaccccctcctaggacccctccatcctccacgactcctcaggaacctactacgccttcgccacctccctcctcaccggcccctccccaaaaaacatccaagtcgcctccgccccttccccgttgggaccgtggacctacctcgacatcgaccccctccccaacccgggctcctggacctcgggccccggctctttgacctgggccccctcggtggtccggctatcagacaactcctacgtgatgtactactctggccagctctccggcaacaacagcgcataccactgcatcggcgccgccaagtcaacctcctccgtcacaggtccgtacacacccctatcccagccaatcgcttgtcccctttcccaaggcggggcgatcgacccggccgggttcctggaccccttgacagggaaacggtatctggtttacaaggttgatgggaactccctcgggaatgggggttcgtgtgggaacagtgttgctcctcaggttccgaccccgatagtactgcagccggtggcggatgatgggatcactttcgttggggagagggtcacgatactgggatcggacggaggaggatggaccgtagatggaggaaccagaaattgtggtttgtttggaggagcgggggggtatgtgcttttttataaagatcattatgggagcgaagaggggtactcggtaaattatacccgaagcgaggaaggtaacgggggtgtacaagaggcagaataaagggagttttggttactacgggggatgggttgggggttgtcgcgccggggggcgcgaagcgcggtggggacggtggatggggacggtggggggaacaggacgagtattgtttttcatgggaactgtggggaggggaggtgtttgttcggggttgatgttagtatcgggctttcgtgagggatacagggatataagtttgggtatgaggtaaggagagatctcatgatggatatgaaagtacatggttggatggtggttcgagatggggacagtgctatagtaagcgaggcgaagagatatggcgggatggatatcaaaaggcgtacatagatgaattaatgtgtaatacgattttcatacttgaagtcgctttctttgccatgcttcagagcttcttcaaacaatccatgcacggctcaacaagtggtagcagagacgaaacgcacaaccctccagatgggacgaaccagatccgcagacgagatggtcgtttggtctcaagattgggtctcgagatctgtgggtggtggcctataaagtggccgatataacggccatgccgcacctccatggccacatggggagccgcccaccaccccctggaaaggggaatccgttgtgattgtgctctttacgtgcgtcttcagttacaagttgcaagatggtgtttttgagacaagtcatgttttcgaagacttggtaatgaagcttcaggaattggcatcgttgtgaggcactcgaagaagacaaagatagaggctgtggtgatggaaatagaagcagtaccagagctgaggagccctcggttagtctgtgctctataggatcgtcgatgccccacgctggtaccaccatccatctcttgactgtcttagttgctgtgtctgcgttcacgggacgagatggacgggaagatgggaaagagtctgtttgagggcggtagctggatccctcgaggtgagatccgagcgcgagactcacagaaaaagacaagagatcacagtgacgggaagagcgctcgcagcgggtaaacggcgctgtaaagtcacagcaggtatgtgaccctcccagtgtcgtgcaggcgcagttggtgcaagaagcgaatgagcttggggcagcgccggatgttcgtttaagcttccaacgcccccattcccaaaggggattagcccatgatcttggtgatctccaagcgcccgccaagacaccctttcccagatttctcactctgaacctgaacctcgccgacactcggcatgggcctgggcagtgggcgaagcgctgcggccgcagatattgacgattccagaatgccgggtttgggtattttccgatgtgtcttgaagaccatcaccgtcacggtcactcaccatcactgtcaccatcaccgccacgctgcagggctggattgacgagccaagtgctgggaagagaggaacaccgacgatggaaaccatctccttctgtcaacacaccaccacacaccacttctcctccatcagcagagcaacgacacaacggttttgggttgatgatggtttctaagaattgactgcagcatgcacatctccattggccaatccgtccgagagcgttgctgccgaccagacgagctcaggtacggtccatctgccgactgtcagccctgattggactggctggcatggggacctggccgggggttcaccagcggcacattgacaagactatcagctcccatcacaccctcaatgcaggttggcacaccatctgaatgcctccccacttgcctgttctggcccccgtcacgtccacattccccttgacggcggctccagaatcgatacttgtactggagtgaatccacctcctccatgttcttgggttcttgttgccactctcgctcgcttggtccatcgacaaccacccttctttcttcttcagtccgtccttttcatcatatagttaatttacctaattctcccaggctggatcctggttctttaccgctttacaatgcttctcctaccggttgttctccttatcccacagcttgtgtcggccctccaagtaacaccaaactcgccatgcgcctcgaaatgcctagactcagacgacctcgatgcctcagatcccaattcgtcacacacaagaaattcagatgttgtttgcgaggacaacaagttctcgtcggcaaagggacaaaagtggcagacatgcatgtcatgtctagagacgagcaccttttcgcaagggggggagagcgacaccatgtggttcttgtgttagtcatccctgattctgtatatggaagagcgttctcactaacagtgtgtcccagataaccttcgatatgctactgcattgtgcgtttttgggtatcccaatgggacaagtatcgggctagatgtttgcaccacaaccaaggcctgtggaccattacgagacggcgtcgaacacggtcttctcgaccaaaagaacatgacggcgtactcatactgcaaagccggcgcaggaggtgccaacgacctttcccattatgaaggctgcttgtcttgtgttgccccccatggctcgacagactacctgaccaactacttcaaggcgatggaggccggatgtgcccagcaaccggcaccgggtgtgcctcttggcctcaacgagactgtgttctctaacaaccgaatcacccttgtcgatccatcagcacccaaggacgatggcgacagcgcgccggccgttggcacaaccaccatcattggtatcgtggctggagcggtggtgttgcttctagttggcggaggattcgctttcgtctgccttcgcaagaggaagaacaagaccagacgtgccagcgccgaagccgacttctacagcaactttggtgtcggcggtcatggccaccgtcccaagtcatctatctccttccaatgccagacacacatgatgtcccctcgcttctggcccggagcggaagagggcatctcccctgccaccgagcagagcccaacggacacccaactccagaggtcatctatctacaagccccccatgggcggcatcgacgccatctcttcctaccccaccaaagaaaaccgttacagtgtgcaacagaaacaacaagacgattccatcgccaccgctccccacaagatgggcatgcccctccaccaaatcaccaccacccttccccccgcctctcctccccaggtgtacacggcctcctccgaaaaagtctactactccccctcagacttcaagtcccccctatcagccgactcggtccgcagcaccgctgctcttttaccggctatcaagccctacatcccagctgaatacggcgtcgttggtcaagcgcagccctacccccaacctcaagttcccagcccagctcccaccgtcacatcttttggtcaaagcccaacgtctgccgtgtcagctccaggaacggggatgacgccgctgctgaggggcaacccttggtccgccgctctagagaagccccagcgtccagttattaatgtaccgccgcctccgccgcagcagaagaaggggagggagagcgtgatgatggttgggttggggattgatgccggggcggtgccgcccaaaaggaaggggacgccgacgccgacggggagtccggtggagagtgtggagatcaagactgcttttaaggcgccgccgaggaggtgatttttttttttttgttcccgaatatacctatgagcataccataccctattgcaccgccaggtgcttttctttgaatgtattatttatggaattaagtggatgggtggggtggtgtatgttagcgagcatgggatatatggactaagtaaggtattggtgttttgggcgtttgtctatttgagatgtacgcatatcatatcacatcatctgcctgtccacctatctaccttacctacctacctaccaaagaggaaaatataacttgtatatcacatctttctctgtttcattctatcaacttcctctcctcgcttcactgtagcataccgtcaaaaccacaaatgtcgaagatatctaccgcagcgggaggagggggaggacatgatagtaaataagagagcaaaaaaatataagcaaagtctccggttctggctggcctgtaacctcctgcttgctacgaccaccacaaccctgctttttttcaccacgcccttgtgacattcgttccatttactgagatgaagctacttcgctggggaagtgggagtcgggggaggtatatattgagtgggtgtttgcttatgagtcggttaggtagataactggtgggtgggtgggtgtttcggtgtttgactttttgtttgtgtgggctgggttaggctgataataagagtaggtagaactgtagcatcgatggcgcgatataccacgtcggatattttgtaggtggacagacagccatctaggcattgtcacgtctttcttcacagagacctggtaatcatgtaaatcagcgaaactttttattgagccctcgctacctgagtaggaaaataggacggaaccatgggtgagacgtctcataagagtcccctaatacccatccgaaatcagcttcctccccttcttcaccgtgtcaaatgaggcgcataaccatccaaactccagcttgaagactcctctccggctcccttccatcatttttgatgccagaagtcctcaaagcagacccctttgatagccatgttgatgatccccagcgccttttcctcttgtctaaacaccattttcctcctgttccgagaccatttccctcccacttgagacccttccccccctcaagtaagcctcgtccaggtcaaactcattatctcctgaaatgaagtcctcaaattcgagatccaccagcaacgcttgaactccaattgcgtctccagatctctcccaccggtcggcgggcataggacccggctctttcatgcactccttgaaagcatagatgcttgccacaccagcatcaagaaactcgaggacttcgggaaacagtctcagggtcttctccagatgcataacactccggcagcccctttcaatctcctgtaatgcctggctgagacagacgagcggataatgatcagtgtcggtaagataggctgtaatgcgcgccttcagcgctgtgaaagcctgactagccttgacttgtgtggtgatgctggctacggcgtctgcgaactccttcttcatccaaccactcttttgccccgacctattgatcgtcagcaagccatcatggtcaatgcagagatcctctatcgcgaaggtctttttgatgtgcttatggagaccgatctgttgcagggagcgaatagatccatgcatgttcaatgccacctgcgcagctgtgcacttgccgccgcatcgacgttggctgacgagggggcgcctcgttcaaatcttcaaaaatcttcagcaacttggaactatgtgccaaagagcgaatgctgtcctgccgtgacctggttactttattgaacaaccacatccagtcggtgttggaatcgatttcgacgaagtcgtccggctgagggttcatgatggtcgacatctccttggggtcgaagatgatattcgagagccgagaaattcgctgaaacatggacaggaaagatagttgaaggcgcaagtaagtgaggtcgagccgtctgaagatagctcgaaggcgttcagtgattgattgaaggcctcaagtaactggttgaaggtatcaagagactccgttcagaaggggtagaggacgaagttgttgggtggaagaagaagacatccaaaatcctcaagcaggaaaagaagggggcattcctacctgtccctccacctctctgccgaagcttctcccctctcaacaaggcaggagcacccttcggcaaacgtcaccagatccttctctagaggtcctcatctctaccgtaggcttccaatcttgcggttcacctgaactttgacccccaagagatctcgattagctacaagagcgcagataatctaacagataagatattgggtgacactgtgtagagcagagatgacaatggaatcttctgctgtggcttgacccacgacactgaactggcccgattgatagctacaaccagcctctccaatcgctatcttccacagacacaagctccaaacacagcagggggccctactcttcattacccctttcgaaatcagcgcacaacccatccccaagcctcataggaagccctctctgctatcaaccctgccataaccgtccgactcccctaattccccagctcgaagacagaatgcccagatgcgcccgtcataccggagcatcccactgatcagcgcaaaacgaaaactcgccattcaaagaagcgacgtgaccgatgtgaatgtggtagttccagagcgaacgattcaccattgccagcagcctctccggatcctgcagtagcaactcatcccagtcctcttccgcgcggctctcaatctcggctgtctgctttgaatcgtgtccagtggtccatggtcagcgaacctggcccctcgagcccaagcgtgacagcagaaacgatggctgcatcagactcgagctgcttgagcgctttcgcacacatatcccaagtattgtgcagctgttcgagagtcgggaattccctagtctctcctgaacgctcgtactgattgacatcttcagccaaatccttcgcacattcgatattattgtcgaggaccccaagattcgcaatagagctgtatccgaccaagagttttccgcagctcaaggaacgcagtgtgatgagaggactttgctctgaacttctgtgaaagcctcctggatgttgatcttgacgtgtctttgggaaagctcgacggaccagagcgactcaggatcaagatcaacgagcatctcaagtaaattccctgaccggctcgtcctcacggcgtcgcttgcgggaagatgaagacgcagtcgtggtctggttgtccgaggagttaccggaggtgggttgatcacctagagacacgccttgatcggatctagccatgacgaaggccgaatgactgcccaagggaggagaagtggttgtttagaggaagaagaatcagaggcctgtagcaaagaagaagagagtacttatacctgaccctgccctctcaagcaggcaagagcaggcaaagagccacctccaacgccctacgtcaacctcaacctccccgagatgccagatctatctgtaggcagccagataggtatcatactagaatctcccgctgacctcctgtacgacgtgattgcacatacctacaagacgtgacatctatctggcatggcagcacacatcttgctcatgtccgagctgtcaaggtcgccgcaaaacaaaccacacagcaaccatatacagcttgataaacctcataataagactcggtaaacatcacaccccaaaggcgccctagcctgataaccctgggcaggtggtcgtcttatcatccgaccattttcccccatcaatttcaaaataaaatctcacagggtcaccatcgtgaaccaacatgtaaaaccaaaaacccatgaaattctactcgagtttccacaagacacctgtctggaacacttatgaaaatcaaacctcaaatatctcccccacccccaccccctccccccctccccttcgattctccaccaaatccaacctccacccctcccaattcttcaaccccctcttgatctccttgatcctctccaacctcttcctcccctcctcctcctgcgcccgcctaaacgcctcctcatcaaactccagttcatcatcatcatcgtccaaaaacccatcatcctgatgtccgtgtccgtgatgatgcccatgatgttgatggccaccaccagtcagagcactcaacccggctactaatcaactgcccaaaccccagnnnnnnnnnnnnnnnnnnnnnnnnnnnnnnnnnnnnnnnnnnnnnnnnnnnnnnnnnnnnnnnnnnnnnnnnnnnnnnnnnnnnnnnnnnnnnnnnnnnnnnnnnnnnnnnnnnnnnnnnnnnnnnnnnnnnnnnnnnnnnnnnnnnnnnnnnnnnnnnnnnnnataccacaacaggaaacaattagaacctgggggtgggggaggcagcagcactgtcggggggggggggggggggggaagacaaaccctcttcttggccgcggcgagcttctcagctcgttccttttcttcgtcggccattgttgctgtttttttcaatgtctcaaccggttactgtccttgacgtaagaaaagatggcaggaaacatcagagttggacgtgaaaagagcttagttgttgcaaggtgggagcaagtcgcatgggcgaaggtggcatcaaagcaacaagccacaaaggccaaccagttaccaggtaagctggggtgccctgagggccccatagcgcccaatgcacacttccctgtcagtaagccacaggtgtacaggggtacatggggtatccaaaggtgacgccattcttctgtctcaacaactccccctttaaaacatctctcccaaaacatacacacatgacagtcaggcaagagttaacgtcataagcggtctattgcttccatcatcatgctatactattcataaacgcagttattcccgcaaaaaaccaaaacccaaccatacagcatttccacccgacagttttcccatcggtccaatccttttaaaatcaccaaattgacaggcctggttaccgtctacctacattattgcaactttttatattggattttttgtatcctcgtcccctctcgaccttcgtctccctctttagaggatctgctggaaagcgcggttgatgggcgagcggacggggacacccttccaaaagtcaatggtctggagggcgcgcttggcaacaccctcgggggtgaactcaaacttggcatagacgtccttgtaggggcccgaagctccgaagcggttcaggccgaactgctcgtgagtgtacttctcccagcccatggtggacatgacctcaatggacagagaggggatgccgtcggggagaacgctgagctggtagtccttcggctgggtgtcaaacacctcgaagcagggaagagagacgacacgggccttgatgctgtgcttctcggcgaggagcttgacggcgtcaatggcaatgcagacctcggaaccggtggagacaagggtgatgtcggcaccctcctgctcgtggaggacgtagccacccttgatcgccttctcgatggtggagccctccagctggggaaggttctggcgggagagagcgatgatgctgggggtgtgcttggaggtgagagcgacgtagtaggcagccgacgtctcgttgccatcggcggggcgccagaccatgcagttgggaagggcgcggaagtgagtgaggacctcgataggctgatgggtgggaccatcctcgccaagaccaatggagtcgtgggtggcgacccagatggcgcgggcctgggacagggcggagagacggacggcaccggcggcataggacacgaagttgaggaaagtaccgccgtatgggatgatggtaccataggcagcgagaccgttcatgatggcgcccatgccgtgctcacggacaccataacggatgtagcggccgtcgtatgtgccgaggccggtcgccgggggctggaagtcgatcgagcccttggagcgggtaaggttggagccggtcaaatcggcggaaccaccgacaagctcggggacggcatcgaagatcttgttgatgacaatctcggagagctttctggaagcaacggcggcgtcggcaggggtgtagacggggaggttcttctcccagccctcgggaaggtcacccttctggcgacggacgaggtcggcggcctcacccttgtactcctcagagtacttggcgaacagcttgttccactcctcctcggcggcggcgccggcgttggaagccttgcggcagtggtcatagacctcctggggaacgtcgaagctcttctcggggtcgaagccgaacttctccttgagctgcttgatgtcgtcagccttgaggggagcaccgtggacaccgtgggtgccctgctgcttggagccgaaaccgatgatggtcttgagctggataagcgtgggcttgtccttgacctcctgggccttcttgaaggcgtggaggatgccctcgaggtcgttgtcaccgtcctcgacggtgatggtatgccagccgtaagactcgtatctcttgaggacgtcctcggtgaaagcctggttggtgtcgccgtcgatggtgatgtggttgtcgtcccagacggcaatgaggttgccgagctggagatggccggcgagagagcaggcctcggaggagacaccctccatcaagcagccgtcgccgaggaaggcgtatgtgtagttgtcaacgaggtcgtagccgggcttgttgaagacggcggcggtgtgggcctgggccatggcaagaccaacagcgttgctgataccttggccgagagggccagtggtgacctcgacaccgggggtgtcatgggcctcggggtgaccgggggtgatgctgtcgacggtctatagttatggctgtcagaatgctggccaacactggaaggcagaaaataagctccaacttacacggaaggccttgagatcatcaatggagagggcatagccgtaaaggtggaggagggcatattggagcatgcagccgtggccgttactgtaggttcatgcggtcagatcatggctcactcatcccgcggcaagctgtgtgtaagctgggggctcaagcgagagaggagcacttacgagagaacaaatctgtcgcggttgagccactttgggttcttggggttgaatctcatgatcttgttgaaaagaacgtgggcaactggtgccatgcccctacactggtgtcaataacctcaagccttggttgcgccggcatcgggcagtccgtgtttttgacgccatcgtcgcggggagcttacattggggcaccggggtgaccggagttggcatgagcggtcgcatcggcctggaggagagaaaatgtgagtggctggccatgatgaatgcgctctcagcagtgttgccgtcgccgaattggacacatggtggaatgcgaacaagattgcgatggcgggggcggggttcccttttttttttctgttgagagactcttttcgggatggaggggtccgttcacttacggccagaacacggatcgtgttgatggtcttggtgtcaacctcggtgaagcccatctttgcggtttgtctggatgaatctgaagacaatgacaagataggaagatgttacgaggagaaaggggaggagggggggagtcactggatatatgaagagggaagtgggaagagagcgaaaggttcctggtggggtgttttaacccaagggctccaaggggcaaggggagggcgttgggggtcgggacggtggtgtgtgtcgacagagtggggttgtgcctctggggagttccaggtaggagagcttcccctgcccgtgccttctggagctctggttcgcccggatgaatgccagctgtgggaccttttgggggaggccagggacctcgaggatctaatctctcacctctctcgtctctgccagccagtttttgtctctctttttattttttttatttcttttttcatttttttatctattttttttcttttattttttttattttttatttattttttttcctttaaattttttttctaattttttttttggccccagccgcgttgatcttttttcccaacttttttctgtagtcgcctagcatcggagctggcggagcttggtgacgtcgagaagtctttgacgttgctggcgtgcttaccttagctccggcttgttcttagcttccccatcaaaaagatacatatcctcaataacttcatcatactatataccttttacctagctgtacctcaagggaaaagaggctgtctaagggaatgcttaggtgggagcgcaatgaaacaacacagcggcacattggccattgcttgcccctccaaagctgccccgcgtttctccagcttgggtggctccaagaaagatgatcaatcacgaccaagatatcacaaagccatgctgctcactcagcgaaccagaatctccgctccgcggtaatgttatctttgccttggatatttggaattcctgattctccggccgaacagctggctttctatgaacggccctatctccgtcagaaggaaagacccctgaagaacgaaatcggaggttcgcccgatctgaatgtcagttcacttcgaggatggaaaacaaatgcaggcacctcttcgtggggacggcggggtcatcttttgcttgctgtgcccatgagctggtggaggcgagcgttattggccacaactttgcctctggttgggccatgatgagacgacttattcatagcacaaagcaccagacacatagtgcttgccacgccatcctgctgctgctacatgccgagagtcttttggcgttacgtgatgcccggcagaatacatccgtttgatgggggtggacttactcagggtgtcagggtctggtgaggtgtaaatcccgataagggttagggtccaagcgtagataacttggagctaaaaacttcaatggtggggggaggggtacgttcttacacgtttctgtctgtctgtctcaacaccaagtctcatcccgcgaaccgtccaattcaggctaaaatctgatagaggcattaaacccgcctagaccctgcgtccccacaccccagctaccaccgggctgagtgttagagcaaggctgagaaagtctcttacaacaacatctcccaaaatagaaattacacaacattcagcctctgcctcactcactcacaacctgagcccatctcattatggtccaagcaaagctggataccgcccctcaaaaggcacggtcaaaacaaacagcgtcaaaaccaaagcgaagacgtcaaaccccagagcaacacaagcttaaaccaaaccccaacaatgaaaaggtcatcatctcaccttcggagctaacacactaccaactcatcctcgatatcttcacccgaaccttcaacgaaactctcaccgatgccgacttcagcaagaacctgcaaaccctcaagcaatccctctttgaccgagacttcgccacggccttcacgaacaccccctccaacctcccaatctactcagcccgctggtcacccccacgagctctggcctactcatccatcttcacctccttatcccgctacctccccagactctactcacccaccaagaccctcccctgcctcgccataggaggctgctccgccgaactggccgcctttgcctcagccctcaccctccttcccggttccccctccggcagcctcaccctcttggactctgccccatggagtgaagttctcaccaacttatcaacctccctcacgagcccccccccaatatcaaaatacgcctccaaactcaccgtccaacaaccaccctttatccccgccgagaagctcacctacaccttcctccaacaagacgccctcaccacccccttcaacaagcttttctcctctgacacctcccaactggtaaccctcttcttcaccctcaacgaactcttcacctcctccggcataggaaaaacaacctctttcctcctcaacctctcctccgccatcccgttaggttcactcctcctagtggtcgacagtccggggtcctactccgaaacaaccgtgggaacctctcacaagaaataccccatggcgtggttgctcgacaagattctctcgtcagtctgtccggacgtcaagccttcagaaacgcccgaggggaggataaagtggaagaagctcgagagccacgagtcgatttggttcaggttgccagagggggagctggactaccctatcgggctggagaatatgcggtaccagatgcacctgtacaaggctgttgatcccgctgctccagaaaaggaggagagtggtgatgaggagggtgatgatgatgaagagtgaaaaaggaaaaaaaaaagagaatatactattaatcacccactaattgacttccctgccattgttgctatgttcgcctgctatctatctactctcattacggctcatgtaacccgcccgcactgctatgcttgaaaagacacaactctctccctcaaaacaaacaagacaaaaaaagaaaagaaaaaaagaaaaaaagaaaaaaaaagaagaaaaaaaagaagaaaaaaaagaaaaaacaaagaaaaaaaatatcaagcccaaaccaacttcttaaccctgtgccccaaagtctccagcaaccccgtgttcttcttcgcctccgccacactgataatatcccccttctcaatcaaatgtccctccccctcctccttctcccccttcacctccctcggctgattcaacagcgccaacctctcaatctcggccgcgataacaaccacctgctgagtctcggtaagccgcgcaatgtcctcatcctcctcctcctcccccccaatcttcaccttcccagcaccaccctccccactcacagcagcagacgtctggctgtacaacgccttcaacgcaatcttcctcgtaggcgtcgtcaccgcagcagcagcagcagcagcaacattctttcccgaaaagaagcccgccacccccgacagcgccgcgctcgcaaagtcgtcatttgtcggtttcgggtgatcactcatgctcgacaacgacctcgtgttgacacgcgtgacgtccgtcaacccaggcttgtactcaatcaccaaccccatgttcctcagctcgtccacctgcgcaggcgagatggtgctcgtgatataagtcccgaatctaatctttgtcacatgcgccaggtcaaccctctcaaagctagagaccttgtcgaggttccagtcaaaccggcagagatagagggccgagtcggtaagtagcaagactgcctcctcaaaggtggcactgcggatggtgtccggcgtgctaggcgtgaggaaggcccaaccaccaataaactcctctgcttcgtcttcaataacccgtttctggcagagctcaatagcctgctggcgcatgttttgcatcgataccgccgggtccttggtcatcatgtttgcttcaaactcttcaaacacaagggaggtgacgttccccaacaaaaaatcgatgctggcttggagaaaaaagtcgttaaacatcctgccacactgttagcaacccagcaacccacagtcgggatcaatgcagaaacatacccattaaacaacctcgtcaagctcaacccagcatccgtcaacgcccccctataattcctcttcctcgtcctcgtataatcccccttcatcgccccggtccccgcatactgcttcccgatcgcatccccattatccgcccacaacccattaaaccagctattctcctgatctttttgcttttccatatcaatcccctcctccctcagctgcaaatccagcataaacttcccaaacgagctctgacaaacattcgtccgatccaaacaatccatacaattcgtcctcaacacccccttttgtcttcgctccacaaccccatccaccacaacactactccccagctcctccagcctcccgcccaaaatccccaacaacacgctcacattctcaaacttcatccccctgcacaccgagtgaaaatcaaaccactcgaacccaatcttttcctttccctccttcaccaactcctcgttcaacctctccacgccccgttcgtaaacctccccaatcggtgcctcgaccccatgtttctccaccaaattcaccacctccaaccccccgtaccgctcccccaaccgtccgaaatgcttcctcaacgccgcaaagttcgcctcctgactatgctgcaacaccggcgtcggcttcaacgaatacggactctgagtaaaaaacaccgggaaactccccctgacttgcgcaaaactatacaccctccccttatcccccccatcagcctcatacaaaatctgctccgtctcgaccccattcgccacccatccctgctcgtcaatcccccgacgcaaatacctcaaccccgcccgttttatactcctcctgcttatcaccgtgataacaaacttcctctccgtaccccccttcttcccgcccaatccccccccctccccctcccgtttctcctccgaaggcgacagatccctcatctccacactctcctctccccccttttccccctcatcctcctgagccgggctctcgtccaccgtaaactccctctcccctacaaacccctgcatcagcggcaaaaccaccccctccacccccgcctccctgaaccgtctcatgatgtgcccattccagaaatactccccctccaccccctaccccagccctctcaaccccccatccgccaacctcctcgtaacatcaacatcatacccaaagaagaacgtcctgctactcccaaacagtatctgtgccgtcctcagcaacttgggcaacaactcaatcgcagcctcgctcccatccgccccatccgggatctgaaacctcgtcggcacgttcttattgctcgccctattctgctgggcaggaggagtgccagagtcgggcgtaaggcccatctgccttttgttctccgccgcccacccggagcgggaaaaccacctctgcgcaaaacggccataactcccccgtctgctaatcacatccttcgcaatactactgctgctcgtattctcaggaggagtgatggcgtcgtcctccgttgctgactcgaccgcgtcgtcacggggcagttcatcaatccctaacccccccgtttcttcgtcaccgctggtagactggcttgtgctcccctccttctgcagcctgttcttcaacgccagcgccgtcttcccaatcgaatccgccgcttcctgccgggaggtgaggggtgtcaaagcgacttcggtgacgacgtagatggggtggcgaccaaacaaattagcgacctgctgccttcgggtgacggtgatgaggtaggagtagtgaaacactgttattatgcctgtatgatcatcccacccactgcgtcaacatcatgtaccggaaagatggtggggcgggaaagagacaaaccaacaaccccataagcctcaaaactctcgctcgtcgctggcggtgcgtgatccctcccgacggtcgaaacagaaacattactcccatacttgatcttcaccagcggcaacggcgggggccgactcccgtctttggaggggacagggttcaaagggtgaagaagcaggccgtcgaccgccgcggcgacgaggaccttgcgggctaggccgggcatttttcgttgtttctgtgttccctgctgtaaatgatccgaggtcggtatgtcttacatgtataaaaaaaaagtttatgcagaaggggttcaggctagaaaaaggggcaggcagcttggaatgcagtgtaagtgtaagctatgacgcaaaatgttgctgttgggtccatgagctgatcgatgtaagctctcataccgttgtcgtcgttcctaaaggttgaaaatgctcgaacaagtcacacgaatcaataactggctggtcccgtgatcacttgagacttgagcaaaagaaggccaacaaccttgaggggcacggggggagggtctcgaacttgggctggcaggtgtgagagtgatgatgtcttttaaatgggcatggtggggccccacgccagcgccagttgcgcagccaaagagcgtcactgtgcagaagcagcccccccccccacgtcagacgacccaatgaataatgaattacacacactccacacccaaccccaaccctagctgtatctaaatccaaaatcaaataccagccaccccaactcaaacgtgaaacggtaaagaccgatagatacacaacgcaaaaagaaaaggccctgatgacgatgaagttttgattttctagaaggaaggctactgcagaaaacgtctgccagttgatgtagcaaccccaacgctcacaaaaatgacgttggggatatagataaaagcaacatatctcagtttgtttttcatccatttctgtccatccatccaatagtataaaccatcctcggattttcccttttttttcttctttttttcctctctcgctttagccaaccgcaaaaattgctactttacatagcaagtctctcgaccttgtcgcggagggcgcggatcttggagttgaggtcggaagcctcgttggaggtgagggagacggcgatcacggcgcgggagacaccgcaggcacgaccctgtaggagtcattagttatactgcgtcttcagaacttgacagacaaaaacataccagagcaatcttgctgggcacgtaaacgtagggcacgttcttctcctcagagatcaagggaatgtggaggacaatgctgaggggagcagtgtcggcggcaaggatgacaagctcgctggtgccgcggttgatggacttggtggcctcgttggcgcccttcttgagctgcctgtagtggctggcctgctggacgcagtcgagaagctcctggacgagagcagggtcctcggccttgggccaggcggcagagtcgttttgaccagacattgtcggtgtggaaatggatagcgatagtgtgtgcttctgtttccgatcgtctccagggttcactgcaggtttgctcgccctgggggtgctaggggatgttgctggggattgcgacgtgaacgatgcagaagaaagagaagatctcaaaaatcaaaaatgcgcctgcgaaaaaattcatccatgtgtttgcgcctgcccaccaccacccagccgagagtttgggcggtgtggggtttctgccgggcagttgtggcacggtggcacggcgacagcgacacggtgacaacgcttacctaaggcaaagctcgctggggcctgccgaagcaaagctttgcccagccgatgcacagccaaccaacctgcaacctggaaacacctcgtccagcaaacaccagccaacaacttggaaccgtcatccccccatccacagcaactcgccttcaaccgctgcccgccgacttcagtcaacaaacgcatcgcaaccacgcttccatcgcgttcgagccttttattttcgaatcttccctcagtcgatacagcttcgtgcttaaacaaccacaatgtcggatctctggtaagccgctagcccggggggtgtcccctcacacttccaaccaccacaaccacaacacacatacgcggaggctggagctatccgctcgctactcgtcgaccaccaccacaaacacaaccccctcttcagcaccatgcattggctttgcgcatctgctgcgatgccttcttcttgaatggctttgctaacatgctttttgtctacagccccgtctacgcggttagtaccctcgctccaccccgttgaaaccaacatcagctctgtggcgtcggcgaatacacctcgcttcgactccataccgatatcaacatatacatactaacatgccgtaacagcccttcttcggtgccatgggctgcactgcggccattgtcttcacctgcctgggtgcctcgtacggtaccgcaaagtccggtgtcggtatcgccgccatgggtgttctccgtcctgatctcatcgtcaagagtatgttgcaccccttcccaagtcaagggatgcttgactaaacctttctctagacattgttcccgtcatcatggctggtatcattggtatctacggtctcgtcgtgtctgtcttgatttccgatgctctcacacaagactcctacgctctctacaccggtttcgtacagctcggcgctggtctctctgtcggtctcgccggcatggctgctggtttcgctatcggtatcgttggtgacgcaggtgtccgcggtactgctcaacaaccgagactgttcgtcggcatgattctcattctcattttcgctgaagtcttgggtaagtttgtgtctgtcatgcatgcgccgcagcaagcactaacgacatgcaggtctgtacggcttgattgttgctcttctcatgaactcgaaggccaccatcaacactgtctgcgcctgagcgtctcttttggttctcgccgcgggccgatgtggacggacaagatggtttattgcagcaaatccacatctcaacgcggaccacacatccacacatcgcctcgtctcgtccctgtaacgggctccgagatgggggtacatccggggttgtcatgacatggcggagatgatgattggtatacattatttgggggttgagcgagcggcgcatctcgacgattggaacggttaatggtttggtggcaactcggaacgtacatgtactattgtctcattatggttgctttatcacactcgcggggtctggttttctttttctcatcatagacggatgatgggcaaagactgtagtttaggttggaatggtgttctttgctatctgtgtgtttctctttggtttatgtgtgacgttgcaaggtggctggctgtgtgtgtgttgtcatggtaagtgtttttgagaagattgtgttgggagttgttttctgaccctggcacggtgtttctggaccgcgtttggttccgtttaaatcattgagaggtatcgctactctgtccttgtcaacacttgttgcaacatcactgttcaggtgcttgatgggaggttgggtggtcaaccaggctttccccttactatcatgggctatcttgtctgacttgttggtgttgtccccacagacatgtgacagccagcaaaaggttttgttccgagtcactccaccaccaccaccacctcctcctccttctccacaaaagctgaatttctctcaccactacacaacccaaaatagcctcgcccggctagctcaatcggtagagcgtgagactcttaaggagtactccgaaatctcaaggttgtgggttcgacccccacgtcgggctcaattcccgatctacgatcacttttttgatgttttgactgtatgtctgtactgcagacaggattgggtgatgtaatgtaatgtaatgtaatgtggagggaaggtgtgtcaacttcagtttacagcagacaggatcgggtgatgtgatgtggggagggaggatgtggcaacttcttttttggttgactatgaataacgtacgaggagacctctgctcatggttttcccgcttcagtgtgtatatatatatgtgtaatgtaggagacattaaacctcgaactgggcggtataagtctcttgtactcgtgcattttcactctcagggttttatagggacatgagaaagttccctcgagacaagtgattcataatgggccaacgaggaacaaatacagaagaggtgtgtttggtcattgacggacagggtgatcctggagagaattgctggacgatgagaagatgggcaaatagacagtcaatgctttgtcttggtaattatatatcagatcggttttgagccatctgaagttgtcgtggctaggaccctgccgacgggaacccaaaccttcccgtagactccggacgactccgaatactagtatttcggcagttgatgtcttgttttgagatggatcgatcttcagccccaggtgaaggaaggatcgcattcgcaaaacgttcccattgtgatgatgcgatgttcgttcaaggtgcaggtggagaatgtgacaacgcaaacgcttaagggaccaacaaatgcgacggtggtattaggtaatactagtattccgccgtgttgggtgccgcaccagccacgaaggaggctggatggctggaatactgacagattgtggctcggacagtgtcatgcaaggggacgcgggaactgccgagtggtcaattgggtttgttcagccgggttagattccccgctatttctgctgtgatcctgccaattgtttcgcgcagatgggagctcgctgctttctcggccggcgggtgagagagcgagagagagagagagacatgggtcgggaatgtcgttgcagtgtgccagcaaagagacacagcagcagtagcgagcagcagcgagtcttggcccttgtcggatgtctttttgtacctaccgtgtacaacgatttttgggggctgtttttttctctcgatcccgctccttgtcgcgtttcccctcccccttttcgacctcaaggcgcagtgttcttttttttccccttcttcttcatacctaggtgtcctagtttacctcgcctctctcttgcgcccgccacctaccatcatatcgaatcatattcttacggttacactccgcgcaccctgtacgcgctgctgcttgctccacacctcgactagggaatactagtatccagatcaacctaaacgacaggggtgttgttgtgtgtggtgggtgtgagcttgttgctttgctttcacacaatttccgatcttttttctttttgttgctgttgtcggttttgacccccaagtacgattacgcttgaaaagtatataagactgcgcgcgcctgccccgtcgcgttgtggtcaagatgtcttctgggactagatattctctgaggcagacgccgaggtgagttgatactttttttgttttttttttgtttacactactgttgcccaactttgccacctgtttacttggtggtggtggtggtctctggcgcaaactggtgtcgcgtttatcgtgtttacacccacctaggggaatcaacctccccttttgcggtgtggccggctggaatgcgccgagatcatgccacacccctctacagcacttggtcggtgatgaatggggttgctgacagtatggagcaggaaaaaagaactgtttgatggcatggtagaaacgcctgctcgccgcaacacccgtcgcaagaatcagccctctatcgcggaatccgacgccgagtctacctcagcctccgagacggttgccagcatggccaccaaatctgtgcgccagcgtggcgtcgccaagttcaccgagcacgtcgacgaggcggatgaggtccctacggcccccaccacccccgagagcgactactccaagcccctcctcgacaagaaggtcaagaccaatggcgccgccgagaaggaggagaagattgtcgacgggtggaagcccggtatggaccccaaggttgacctctcgggcgagtacgagtttggtgggccttggttcgtgtctgtcatgatgatcggattccctcttctcatgtggtacatgtggatcggtgccgagtactatgacggcaagctccccctcccggaggctggtcagtcctggaccgactttggcaagcacctttacaatctctgctacactggcgcgttcccccatgccaaggcttgggccatttattggatctttttcgttgtggagggtgccatgtactgcctgatgcccggtgtctgggcttacggcaagccccttcctcacaagaacggcgagcagctcaggtactactgctcggcctatgcctcgttctacaccaccatcgccctcgttgccggccttcacttttccggcatcttcccactgtacaccatcctcgacgagtttggtcccctgctcagcgtgtccatctttagcggctggctggtctcgttcatcgcctacttctcggccctctaccgcggcgcccagcaccgcatgtctggcaaccacatctacgacttcttcatgggcgccgagctcaacccccgcatgtttggcattctcgacttcaagatgttctttgaggtgcgcatgccctggtacatcttgttcctcctgtcgtgcgccgccgcggcccgccagtgggaccagtacggatatgtctctggagaagtcggcttcctggtgctcgctcactacctttacggcaatgctacttccaagggcgaggagctgattgtttcttcatgggacatgtactatgagaagtggggctttatgttgatcttctggaacctgtccggtgttcccctgtcgtactgccactgcaccttgtatctcgccaaccacgacccttcgacgtacaggtggaacaggtatttcctagtcgcgctctatgtggcgtacctgtttgtgtactgggtctgggacacgaccaacagccagaagaacgccttcagggccatcgagaagggcaagctggtgaagcgcaagacgttcccccagctgccgtggcaggtggtgaagaaccccaaggttatcgagacggggttgggggacaagattttggcggatgggtggtacggcaaggcgagaaagattcactatagctgtgatacgttttttgcgctgagctgggggttgattactgggtttgagagcccgttcccgtggttttatggggttttctttacgattatgattgcgcacagggcgtggagggatattcaccggtgcagggagaagtatggggaggcttggaaggagtatgagaggcaggtgccttatttgtttattccggtaagtttgacactcattctgcgaatctggggttggaaagggggttgatgctgaccggatgttagtacgtcttttaaggggatgcgtgaacagtgcccgatgggttggttgtttggagctgcagttgcattgcaggttgtcgggtagatgcatcattgcgggcaggtgacacgtggccgctacctcgggcacggttgaagggggatgggatgaacaggtgggatgaggtttgaagtctaatcctgaagaatgaaagaattgatgatacgggacgaacgatgatttgggttaggatgggtatggatacgggtatgggataggatatccgatacctttggtaggataaggacgggacggacggacggacgaaagggaatacctggggttggtgatgtgaaaggaaaaaggatggaaaggagggtgggatggagggttcaaaatttgtttgctttgagtttgtgttttctgttgttgctttctcatttttgcacagcaggaagcaggcgaaagcaaaagcgggcgagttatagtgggatttatctcttgttgtaatcgttaatgccttttttcgacatttttgggttggggtttttttttgtttttttttttggaagagttacatgtttattggattatttttgcgtgtttgctttttgatgtttggtggttttgatgctttgatgttgggtcctcggattcatgggattgctggagtcatcaaagacaggaaggggtgtaatgagcgagcgagttcgtgtagttgattctttgtgtgttgaaagggcgttttcatgcccaagttaggtacttacgatgatgatgatgatgatgatgatgatgatgatgatgggtgcttgtatgtctttcaaaaaggaatttcatggaattcgtaaacatgtcaggagagcacatacataggtaaacttagtattgaaatttacacatataatctactcttcttttcaagttcaaagctattcccctccagccccccccccccttctttggccgcccatatttcgcttaaatcaactctgtcgaaaaacaaatactccccccttacaaacagtctaagagaaaaaagagagtgggtatctacagcaatcctacatcctttcacacagcagcaaagaaaaacgccaaaaccaaaaaccacatgctagccaaccctcgctatacgtgtttccctctcctcatttcccccccatttttcttcccacaccaatcctcaaacccccctcttcctcagatcaaccatcataacctccctcgcctcctccatcccctgcccctccctcccaccaacctcgtccctcaccctaagggaaggtccggccttcatctcctcccacccctccccgccatcccacctccccgccttggtgtaatcgcccctcgtcccccccgaaacccacgcaaaacgaaagtattccggctcgtccttcaccaaccccttcggccgtgtccacgtaacattcgacaccaccccactgctcccagccccgggcgcagagttgccatcatcaaaatatgtcctaaacctctccacgtcattgaccaacacgctgatgccatcgtatgacggggcgggcggtgcctcccatgagaaggttatgctggtgttgggagaaatcttcggctcatcaatcaccggaagaggcgactgaaccggcgcatcccccctcagagcgagcgcagtctgcaaaaccggatcgaacccccatctcgcgatcccgttgataaacaaccccagcaaaagaccctgaaacaacaacgacgggcgagtctgaagcgaggtgcccggcaggagcaaaagcgcgaggatgtaatgatgaatacgcaagttctgacccggcagcagcaagaaaataatcaagcaaacagcaaacaacccgtacagtttgagatgagacctcaaccttgcttcttgcctgaaaaaccagatctggaagaccacagcaaagaagaggacgatgatgatgattgccaaagcggcgcgggcaccgggttgttggtttatgtcgtggctgttgagccgctggatggggatgaagtcaaaggtgtagtttgtcaacgacccaacccacgcgccgccgagccagaggatcgtcttttccaagttggcggtcaggcctttgagggtgcgccggatgcccatcttgtcgtacatcacccaggcgacgaacatggccgggaggtagaggccgatttcgcgggagaagagggaggcaaggtcggtgtaattaggagtgtccattgccatcccgactgtccagaacaggccgctgaattgggtgaagaagaagaggcctgggtggctgacgaagagggagaagactgtcgtgaaaacgaccgagatggcgaggagggaccagcgggggtcacgggaggagcattcgacgtcgggttcgaaggtgaagctgagggggaagtaggagtcgaaggggaccgaggtgatgccgttgcgcttggtgctgttgtagttggattggagtcccaccaggcggacgacaccacaaccgcctgtggcgtccgagatgacgcccgcatggatggcagagccgcagatgaaggaatcgcctctgtagatggccggtccgtctccatcagcaggaggcccgccgacgaccagtggcttgtagatgacttcttgatcgccaaccgcccggggattcaacacctggtaactcccacagttgcctgggcacctgaacgggaaacccccatcatcaaacggtctgcagtcgatgccgtccaggccacagccgttacctgcgatccagtaggtcgagccgcaaccaatcttgaccagtcttccccattctgcaatctcgctcaccgattgcccgtttttgagcgtaaaagtaaaggatacgatccagacgacatacaagacgagcacaagcgcggctctgtggagtttgttgggtaggtacctatccagtaacacaatcgggaactgctgtacctgggggaacagcggttcgatccggaaccgtcgaggtacagcaggcccctcggtccattcgacaccagcctttatccaccggcgcaccgggtacggaacccacttgaaccgtttccacgaattttcgtcttggataaaccgtggtgttggtggggagctgtcagcctcgtctgcattccgggcttctcggataggcgcatcggggtggttgttgtcgacgataaggatgttggcattgctcgaggcagcggtggacgtggtaccggaagagtcgccgttcacacctgcttctctttcgatatcgtttgtctcgcccattgttttacccacctacggcccaaggacaacagcaaacaagacacaacaaagagggacggacgggcagggtaaacgagcgattgaatttaggaactcaaagaaggaaaaaatacaacgaggcagaaaacaactagggacggcagaggagggggagcatagccaaggacatatcgggataagcaatgacaaacaacaaatgccatgaacaaccgtccgaactccgagaagcccgcgcccgtctcaactggctttttagcgcaacgctggcacacgctgccctgttcctgtccccctgtaggcagggctgaatgcggggaccctagccgctgcctgacgtaaacacagacttgcgaccccagtggatatctcattagcgggtgcatcagccccgatagaaacaaaaccgtttgaccccaaggtttccactttgggcgactgtgtgcttggcatcgaggggcagcatgagagccgtcagtgggtgtttgaaattgattcgtgagttaatcgttgacataataaatgaaggagagaaagtactaacatcttcgagcaagacagagcttgattgatatctcgagttgtgttgcctgaagtaccaggatcatcgttaccagtctgctgggtcagacgctgtcaaggatttgattttcactcagttcaggaaagacttgcggtccaagctcgctcatacaaccatcaactgcaaaactcgcaaaatgacggttgataccgagccacaagaacccgagtcgacagccatgaggtttgaagtagtgtcctcggctctcaaggagggcacagcagctgctgccagagtcggtcgtctggctcttccgggacgtcgtcccatcgacactccaaacttcatcgccgtcacttcacgcggcactctgcctcatgtcacccctgacaatatcagcaagcacctgcaagtgagcggtgcatacttttccctcgaagactgtcagtgttcccccctcatgctctatcaaaaaccactcattaaccccccaccaagtcgtcgaaaagtcccagcaaaacctctcccgcccaccacccatcttcagcgccccgaccagcaccaaccaccccacccccttatacagcttcaccggcaccccctcccacataaccaccatcctcgccgcccgccgcctccccgccgtcccctccccgataggcaactccaccaaatccatctccgtcttcaccaacactggcttccaaaacctctccacaaccgactacctctccgccgcctccaccctcgaaccagacatcaccatccccctagccgacctaaccaacaactcccccccaggcacctccccaacaagcaaacgagccctccgtatggccgagcgcacggacgagtggatagcagactggttctcctcccccctctccacctccacatcaaccttcgccccagtcctgccaatcccctacccaatccagtgggaatacctctcccgcctggcagaagactacatcccctcgtcccaactctccgggttggcagtccacgacccggatatcatccccgatcttgccactcaccaaccctccctcttgtccctcccccttttgtcgctttccaacccgagcaacccccaccctcatcctccgtcacatagcccacggaacagacctcttcgccctcccgttgataaacgccgtatccgacgctggtttagccctaaacttcaccttccccgcccctccctcatctgggagccccccccttccattggcagtcgacctctccctcccctctttcagcacatccgtcacccccctctccaagtcctgcagcctctacgcctgcaaaagccaccacaaatcctacatccaccacctcctccaagcacgcgagatgctaggctggacactcctccaaatccacaaccacgcgaccatgtccgcctttttcggcgggatccagcggtcgatcaaggatgccacctttgaagacgagaggttgagtttcagcagggcgtacgacagcgagatgcccgcgggggtgggggagaggccgaggatgagggggtaccagtataagagtcagggaggggaggagaatgccggaaaaaagaagaataagcctgcatggcaaaaggaactggcggttgaggatgacaaggtcgaggtaccggagacagatggagggagggaattacaggagaagggggttggggaggtggtaaaggggtcaggtagatgaagcgaaatagacctggagatgggaagaaaacagaataataaataaaaaataaataaaaatatataaaacaatatcttcgcttttgtgtcaaagtcctggtccaagagatgaatctcgtcaccggtagataattcatccatgttttgataaaacactcaaaaccaccttttaatcactacctatccaatatttctacccttttccacgtgtcacacaccgcagcaagttatatacaacccccaaacaccccaatcgcccagacaaaacatgattcatcaaaccacaccctattcattacaaccctttatataccctataataacaaaaaaaatgaagaaaaaaaaccttatcctatctctctacgcctttccctagtttcctagtttttttttggtttttgaaccctctcccgccccttcccatcttgtgccccaccaccgttatccttcccctttactcattcataccaggcaggatgttctccctagctttagacaccgccttcaatccagcaacccgcatccccctcctgggtcgctcttgtagctgcaacaggcccaagactccctgtcggtgttccctttgtggactactactcagcatggcgctgattcgtgacgtataccttcccgcactggctggcgtggcgggagtagctgggctaggggttgctgggataggagcaggaatggtgggtcgagtaggactggtaggtcgggagggagtagctggctccagagaaacatgcgcgggcctaatagcaggagttggtgccgttacaggagttgggaccggagcaggagcaggagcagcagcggcagcagcagcagcagcagcagcaacaggactatgaaccaccaccgtctccattccctcctccccatcaccaggagcagcacccgtccgatggataataaccgtgctggcccctcccccctccaccacagaccccgtatcaggcgtaacaggtgacgggggtggtgccggcggcagcatactcccaccactcccaccactcccaccaacaccaaccccgggtgtcccaggatccgggatcctccccctctgcctctgatgcaacagatactgctggtgatgcagcctctgctgcaacagctggtgttgacttcttccacctgcacaaccaccaccaccaccagcagtcttagcaggcgacggactcaacccgctccccccagcccccccatcatccaccacctcatgatacaccctcttcttcatcggcgagtcacctttctaaggccacctccccttattatcccccccatcccgtcccccagccggcaggttcacatccgaaaccgactccatcctcgaaatcgaactcggcgccctcgccctcctgactttattcccgctctgtccagacgtggccgtcgtagccgtcgtcccgctgctcccagtagacaaactagtcgatccgctccccccactggcatcccgctccctctctatcctttccagcctctcccctaacctatcagcaccgtcctgcctcgcagactggctgaacctctcactgctgctgctgtcttgccgggcactctggctaaaataactccggctctgggagtgactatcccttctggcttggtgcccaaacgcggcagagctactgctcggtctgttggaactgctcgggttcacaagattgaaacccgctgctgataaaaagctagagcttgtcgggctggcagagtactgcgacgctcccgtgatggagatcgacgatccagatcgtaaccggcccatgacgtgctcccgactgctaagagaagaatcactcctctctgccctcgtagcggtaataggcatcgacgccgcagtcgacaagctcggccttgtaaaatgcgaatggctcgtcctcggcaaccgactcttcacccccgacccagaagacggactcatcgccaacccggccgccgtggcatcttggctcaccctcctaggtatgctcgtcgccaccacggccccttctctactcctcggccgaaacaacgccgcctccctatcctgcgccaaccccaccaccgtcctcttcggcgtactattcgcaacctcgatgtaagccgccgcactcgagctcgactggctagcccgatgccccgtcggtgtatgcggcccaccaccaccaccgctcaagtgcaagcccccaggcggcgtataactggtattcctcctcggcccactcctgctcctccccgcacccacccccgctcctcctaccgacccccccatcgacccctgaacactgttccccaaccccaacccactcaacgccagcgcctcatgctgcaggtcattgccaaagtgagccctcaccagctccccagccaaattcctaaccagcaccgccgggtccttatccgccaacccctgaatatcatcaaacaacgccctcaactgcttccccgtgttggacgagctgttagacgacatactcaaattatgcgcctcgcacccatccataatattcctcaccagcctcagcagattcaacctcaccaccgccttcttatgccccagcttctgggcaatcccggcgtacatctccgccttggccagactcgccgccacggcaggactcagcctcaagactttgagcaacggctccaaaaggttcggatcaaaagcattcgccttggcagggttaaaacagctcacaatagccgtcataaacatcccatccatcaagtggctctccaccttggccgtctcctcctgcagccacacatggatcgcatccagcgccgtgacttgccagtactgatcagccagcaggggtaacgtaaaactccaatccgtgattctgccagagatacctcctccccttgctgccggaatgtgccatatcgcagagaataggcaggacaaactcctttggtgggcggtccgtcttcatgattttgaggagtagcggaataatcccattgctggcggcatattcttggcgttctttgcttagtcgacaaagattgaacatggtgttgaggacttggttcgagatctcgcggaagtgcttctgtcccttcttcatcgagagactcagcacatcgatcaagaaatcaatcgcatcggccgagtgaagtgcatccaaaaccgcagagcactgtgacatgttcttgatgaacttgagcatcgtgatctgatgagcaggtgtcatccgtctcagatccttgaggaccgcttttcagatcattagcaacccttttctccgtaaaaaaaataaaaaaataaaaaaaatatattaaaaaaattaaaaaaaagatttttttaaaaaaaggggggcccnnnnnnnnnnnnnnnnnnnnnnnnnnnnnnnnnnnnnnnnnnnnnnnnnnnnnnnnnnnnnnnnnnnnnnnnnnnnnnnnnnnnnnnnnnnnnnnnnnnnnnnnnnnnnnnnnnnnnnnnnnnnnnnnnnnnnnnnnnnnnnnnnnnnnnctactcttcaaaacctgcctctcagccacaacctccttcacatacgcctccgcctgggaaaacagataaaaaatccccacaatcctcccctccaccagctcgctcagctcatccccccgctcctcgtccagcaccttgtgcagtatcgccgccagcggatccaaaatcttgctcctgctgaaaatccggcagaaatcattcttcggcgtcggcccctgcagctcaaacacattccatatcccattcaccccaatcagcaccagatcctgactcgtctcatagtcctcgtccagaaactccaccaagacattcaacccgcccgcgctgacaaacatttgcaatgtcagggtagaagtctgatacatctgcctcacaaacgccgcagcctcgagccgaatctcattcgagtactgcctggcggcaaacttggtgacgatcggtatcccaccgacgaagcacaagttctcttgcaactccacatcatcaaggataatctacccctttgttagtccccttcccacgacacccaattcacaaaactcaccgcattaacaatcctcaacaaccccaacaccatgcccccccgactcttaaccccacacccctccaaaatctccaatatcggcagcagcccatgcgcccccatgatcagccccttcacctcctcccccccctcccacaaatacgccagcaaatcctcggccagctcccccaacacctcctcatcctccacctgcctcatcttggacaaactcttcaccaaactctccaccttctccgccatcctagcatgtcgatctctcgcaatattcgccgccaaatccatctcgtccatccaccccggctcctccatcatggcaaacggatcgtcctcgtccccgtcgtcgtccccaagccagctgctattcgacagcttactcagcaccagctgctgctgctgctgctgaccatcttcactccccctatcactttcttcagccgtcgcctcgttcttcaagaaagacgtcgcgttgtcagtccccgggacaacgccaaatatatccgagaaatcctcgtcctgctcgtcctcggcaaactttgtaatctccacttgcgatctcgtccttcgaacaggcggttcaggcggctgtaacgacgaccccgtcgttgctggcggtctcgaggagttaggtctccttatgctagcccccaagggagattgctggtgttgagtggccgatctcggtggaggactggtgagatccgaggggtggaacagctgtggagcttcctatgaaaatcatcgatagttagtctctatttattgatctcatctcctcaatgtccacaataaacatggtcattctcctcagcacaatagaaaaaacataccttgacaacccccaatctcctgtcaaaaaccccctcgttatccgcaaacaaatccgaataatcattgtcccccgactgctcccgatacagcaaatctggcctcggcggtagctcaaacttgccgttgttccccaacaactgctgcttcgtcggtgactttgacaccctgctatccctgctcctctgcctcctatgcttctcactcaaccggtcactgctcttcttcggcagcggccgtatcgtctgctcctgcgcatcaaagctctcagaccagtgctttggccctttgatcgtcagcagctccccctcaaagttatcatcccagttttccgagtcctggtggctgtcaatagaagcaaacgccttgagccggtcgctggacaacaaccccccaaagttatcctgccccttgatatgcgggaggtgaagagccgtgggcgagatagcagacgcaaagtcgttgtcccagttgtcgtcgtcgggtacctctggtgatctgaacgcatcaggagtaggtctctgcttcgtcaccagcgtcaacgggcccctgatattcgtagccaggttcggccgctggctgatcgggccgttgctctgatcagacccaatcgagactctcatgttgtgctccgaagacctgagagccttattccactgcttaacctcctcaaccgcctggttgaagttggcaggtggtctcgacaccggagcgtccgtcctcctgcacccaataatccacgggtgcttcatcagcttcttcgccgtaaccctcaaattcggatctttctgaaaacaagccataagaaagtccctcgcaacctatcccacccaaatcattagcccttccccgaaacctgtcctaccccaaagaaaaactcaccggagacaccccctcaggcaaaggagggtgatcatcattaacaatggcaaacagcgccggcatagccgccaagttatgatacggcggcttcccctgcagcagctcaataaccgtacacccgacgctccagatatcgctcgccgacgtcgcacccgacagctgaataatctctggcgccatccagtacggggtccccaccacctgagcctccttgtcgttccccgtcatgaactggctcgtccaaacgccaaagtccgccagcttgaccgtcccatccttggtcgtcagtatattcccccccttgatgtccctgtgaatcacaccctggtcgtgcagatactgcaagccctgtaggacctgagccatgtacactcccaccaagttctcgggaaactttccgtacgccttcgaaatcgaatgcagtgatccattttcgcagtacctaaaatacgagtcagtcgtctccccattccctccgtaacaaaccaaaaactcactcaaggatgatattcaagcactcggccgtcttgacaaacccgacatacttgacgatattcggatgctgtaccacccttgtcagccttttccccctttcccctaacccctacccatgcatcacaactcacattgagattcttcaacaaatcgatttcaacctgcagatcaacaacccattagcaaagccccggcattcccccagtcttgtcccaccatcacccctctcggtccggtatcttctcagccaaacctacctcaaccatacgcagctcactcttcggcacatccaccagcttgatctgcttaacagccaccgcctccccggtcccccaattaaaggccttgtagacagatccgaaagctccctttccgatgcagtctcctagtcgctacatagaattttggtcagcttatgtctcataacccagtaaaaacagtccggggcggggtgtgtgtatgcaaaagtgtgatgtatcagccccaaaacaaagaagaagaaaaacccaatcccaatcccgccaagccacacacatgcgtatcctgcacggggtatgtatggcggacggtatactgcacaccccctccatacattcccctcccctcccccacaacacgaaaaagaaaagaggcagcatggctttcgggtatcgggaaatcccagtccataaagtgatcgatccaatctgataggaagggtagacctaaagaaaaaaaagaaaaacaaacgtcctccggaagggggggtcagtgagacaaaaaagaaaaaaaagaaaacctacataatccttcaaccccggatcctgcaccggcttctccaaccgataactctgctccctcctcggcgtccccggtgtcttgctgctgcccaccaccgcctgctgttgttgctgttgctgtagctttcccccattcccaccgccttgatgatatgccgccgccgcccggtccgaaccagagggtcctatcggcggcggtggtggtggtggtggtgccatgtctggctggtgctgtcactttcccaaaccctccttgtgcccttttcctcaattgtagtagttgtcgtcgtgtggtattcctcctccagcagcagcagcaggaaccggcggtaagaggtaagagaagggtgtcggtaccctgatggtcatatccccgcgccctcaatcctccgcggggtatcgatactgggcgatgggaccgaaacaaatggattttgttggaggggtagatacgtcctcgcaattcgcccgtatttctctcgaatctggcggggaaaagacgcagtaaacagaactatccttgagattgttggagcctcggttttgcgggttggggctccgagcaagcaagcagtaggtgaacaatcgctcccaatattcaccgtcatcagcagcggggctacctaaatcaattcgttccttcgttcgctcgttcgtcgtgaattccccgtcgtcgtcgtcgtcgtcgtcgttcgttcgttcgttcgttgtagtgaatcaaagagaaattatcccaccaccttccctgcccgctcaggtagtttggtgtcggatatcggacgacgcagacgcaacaagcgttccctgtcaggctccaaggccagtacaacaaaagaagaagaagaagaagaaagaaaaaagattcatgcaatcccctcccctcaggtaataaaaaaaagccccaagtttcaagaatgcaccccagacaatactgaaaacccagatcgcaaaatcgcggggtacttaaactaggtatcacctctctctctctctctctctctctctccagagtttcaaccaaagaaacaggaaatcggaggtcgagatccaggccaggcagggctgggctgcagccagcgcgccccatgcccccccccccccagtggaccgtgcctgcagcagggccaacattggcgtgtcacccacttttgtttagcgctcgagtaaagtgataggtaatgccgctactttccatcctcacctcaggggcaggggttatgaactgtaaggatgacacctacctgggagaaatgttaatgtatgtatgttataaccaaaagattgtgaataataggttgatactggtatgctatctaaccaaggaatacgtgccgcctcttctcttcttgttgctcagagtctcaacaatccaagtctgtgaacatgttcccccctatcccatcacagctctcagactccccccttccttcccaccgtgccatccatccagaggaattcatcatgagccgtgtgtgagaaagagtgcaccacacacacataaaaggcggggacaacctcatgcacgacaccgtgaaacaaaacaaaacaaggaatcacgatggtgaaccctggaacaataatccattacatctgctgctgcctcctccaactctcaagggccagttgcccaaaactacctctatgtacagagaatatcatacaagtcatcaatccaccgttaaccctatgtgactgagaaaccaaccaccgctgtgatcctttcaaaacaataaaactaatacaaagctgtcggtgcatcattataagccatatatttccttcaaagccaagagtaaacagcaatacccacgagcaaatgggatgcacttttttccatgacaagctgccagaccgataccaaagggtaatccctaaaaccaaagcccagtaacgccgtaaaatcaaatgtgccaatgacattcagaaacgcttttgccgagaatgaaaaaaaaaatgaaaaaaaaaaaaaattgaaaaaattgaaaaaaccaatagaccgcttcgagaaatacacccggtggctcagttggccgaggcctcgcgggacaaagtcctgctcagtcccacctctgcccaccagtcgtctggaatatcctcacgttgagcaaggctgcggacgagccgctgcatcacctcaactccaccaaagaccgaggggtcgtcgctgctgctgccgctacgcccggcaacgtctgcccatgaccgtccggtgctacgagcgcggggaagaataaaatttctaatatcatcctcgagctcgtcctcgtctgtgtcagaattgtcgcatcccgacgcgagctccacctcgacggtctgggggttggtgaaagaggtcctggaagaggcagcaacggtgctctgtgtcgcagccgccgatgctgtagcagaagcaaaggaagagccaacgctcgggggctgcggatccggagcaatcgtggtcaacagcgtctcccatgcattgtcgccatcgggactaagacttctgctacggtcaccgaggccatcaatgcccgccgcaccatggccaacagccgggggaacaagaagggttgacccgctgcgctgagcgcgttcctgccgacgggactcaacccatcgacggccggctgtgtaaggatttgaggtttcatccccaaaaatgtacgattcgccccgtgtgttcgaagctggtctgctgaagggaggagcagctcccgccggggatgtagtggagctccgcgactatgagaaagtcagcaacgatgaacaggtttttatggcaaccacgacagcacataccggatgattgggagcctgggtactccggaggctcgacaccatgggaagcggttccatacgagacatgtaacgatcgcggcgttgaaagttgctgtaggcatcctgtgcagctaactgcgaatcggttggccgaggtaagatgggggaattgtcgtcatcggtttgtgtttgactcggattcgagccggcgtgcaagtgagcccagcgctcaccaaacatggtgatgactcggtcatcgagccctacgtaggcgcgacgacggccatatctggaagcagcatcggtgggtggctctagagcgggtgaccggcgccgtggttgctcaggatcccaatgggtgtcattgacaaggcggcgacggttggggttggcccctgcaactggaactgctgctatatgcgcaacagcaggaacgggaggcggctccagggtgggtgatcggcggggttcccagatggcatcctcgagaacgcggcggcggcgctcgcggacctgttcccgtgcgtggtcgcgcgtgctgtggtatccccggacaagacggtgccggcgaatggtcgagcgcgcttctgccgaacttttttcagcggcaggcttggattggatgtccgactcgaccggcgcttggtacaacctgattggtgaagatgcaggattagctcattgctttgcaaagcaaagaaaaagaattgcgcccgcgatacgggagtgtcttgaagagggtgctggtgggcttgcgcgatggcaaaccccggaagtgggatggatatgccgttgtcccaggtacggacagggagggctggcttcaggggcaaacctaccggagacccattctcttctgattctctgagctttgatggcgtcgcgtaaggcgctccggtcaaaatcgaggcgaaaaaggtaaggacggcaacggttggctaattttcaaagtggccgtgatgatgcgcctcgtcaatcgatgggaacgcgatgtcgggggataatgcgccaatgtgtcgatgtcgatgtcgatgttgggcgtcgcgggtaatcgggcggaacaacaagagggagggagttttacgaccggctcgggggggctgcgtcaaagtctaaagttgggcgggtcattcctttttgtgggtggggctgtttcttctgctggtgcacgggaatggggcccttggcgcagagcctgggcttagccccctctttaaaggataacactcagccaaccccagccacagttgttgtttactgcacagatgaaatgcttctatcagttagttccatgcaaataaccataccttaaggtcccttgcgccgatcccgcatcccgccccccaagcaaaaagctaaaatcgacaggctccagcagttccccatcgccaatgaccgttcttggcagacctcaaaagcatccgcgggccaataaacaccatgagtcactcctgacatcattcccttgtatcacaatatcgatccgagcataccaacgacgacaacaccatgattgatctagggttggcccgcattggccatctcatcaagcacacaccccagacgtggaaggccatccatgtggccggcaccaacggcaaaggctccatatgcgcctacatctcggccatgctcaacgccaaaggcatatcatacgccaggttcacctcccctcacttggtcgaccggtgggactgcattgccatcaatggcaagcccgtgtcggaatccttgtttcttgaagttgagaagcaggtgaagcagagggatgtgagcgagaacattggcgcaagcgagtttgagctcctgaccgcgactgcctttgagatcttcaaccgccaaaaagtcgaatacggagttgtcgaagttggtcttggtggcaggctagatgcgacgaatacactcaaacagaaatcggttaccgttatttccaagattggtcttgatcaccagtctttcctgggaaacaccattgaggagattgcacttcagaaagcaggaattatccgccagggcgtaccctgtgtggtggatggcagcaaccagcagtcagttctgcaggtaatagaacagcatgctaaggaaacaggggcatcattgcagtttcccaacgcgacagctgttgcggaagagcttgcgaagtcaggagagacctttgagccacaccaaatccagaacctggcagctgctcatctggccttccgtctggcttgcccagagcatgatgccccgttaacaagtcttctgcccgctatcaagcagctcaaatggcctggtcgcctccaaaagatgagtctcgaaaacatcaccggccgtcagcaagacgtgctcttagacggcgctcacaacacccagtcagctgaggcactgtctggctacgtccaaagacaccttcgttcttcaggaaatccaataacctgggcgctggccgccacgcaaggcaaggatatgaacgggattctcagtctgttactccaacctggtgatcaagtcgttgctgtcaggttcgaacctgtggacggaatgccctgggtcaaagcagccgatcccaaggagctcctcgacttggccactcaacatggtgtcgaccagtcatcggtctacagcgccggagagaacgtaaaagacgccttaaccaaagcatccgagatggcaggcgaaaggccagtagtaatagccgggagcctctacctcgtgtccagtgtcttgaggctcttgcgtgagaagtctcaagattctagtgaaaatgccatctggtcttgagcgagatcacatgattttaacgcttgaatacacccattcaaaaaggcggtcaactgctcgtgttcaaactggttgataaaacatcccaccaccgtcactgtcatgacaacccccaatcacctcgtcatagtctgcggccacggcatctacctcggcggtccgcaaaacggccatgacgaatcagaatggctcattgaaccatacaaaaagggggaaacgcccactttcatggcgcatatcaaagccggggcggatgttgtgaattctgatccgagatcagtgttggtgttttctgggtacttgccgatcttaccacatgctcccaagcacttgttttgctaacaaaccgccctcagagccgcaacccgcccagaaacgcacctctccgaggcaaaatcctactgcaacctcgccctcgacaacaactacttccccccgaccctcgtgggatcccgtgtgctgctggaggaacgagccctcgattcctatttcaacatcttgttctctttgatcctctactggcggcagcacccgtcaaatcactggccggaacgcatcaccgtcgtctcccacgagttcaagcgcactcgtcttgtcgacggccactgcgcagctgttggattccctctagaccgggtaaccttcctcggcatcaacccccccagcctcaaagccgaagaccaagccagcaaccagctcaccctcggtcaatgggaacaagacccccacggtgccagccttgacctcctcgccaaaaggcaaaagagaaacatctggggtgtcagccaagccctgttccttgataaaaacgaagccacaaaggcaggactggaaggacaaatcaggacttcaaaagacggctctcaaacattgctcgactacaaaggctgcatccgtccctgggctacgtgaatacaaaaaaaattcaaatatttgggctaggcacaaaaccttccctgccactcctctgctcctccctcgtctcggggttgtacctgtcctctcccgctcccatcaccgccccgacaataaactgcaccgcatccttgaccatctcgctgctgaactcgtggcccaccccagggtaaatcctatcatcaacccagaatcgctgttccttatcgaacgatggggacggagggttcactgccgcggatttgagccagttcatgaagggttctgaacacctgggtggtaccagcttgtccactccgcccgagcagacaagtagcttctttccttggaggcgttcataaaggatggtttgccggatgagctcctgcctcgtctgctgcggctggtcggggacaggatgcgggccgaagaggatagctttggggtcgtactgattgcaagccttgatcaagctcggagggaaatccctactccccagaaaactcgccccgtcatcctgagcagagtacgtactcagctttgacaacctcgcccgatcgctcatcaagtctgcacacacatcccttgtcagcatacctctcagaatcgcagattggatggggggaaacatactcataaaatccggacacccaatcacacaaacccccgccctcaccctcctatccgcaaacatcagctcccaaacactatgcccccccaaactaacccccaaccccagatgctgatccaccctcttctcccccctcggccacaagcacccctccacaacgtcaatcaacaacccctgatccaccaccatcccccttatcccaccaaacatatccaccgcatgattctcgttcccctccctccagctcccattcaccctgtcatccaccaacctcgtcccgtgattcctctggtcatacgcaatggctatcaaccccctcctctccgtttggggtgtattatggggggaatgcgtattctgatgatgagaaaaactgttccaagcagcgatacaacgagaggcgatatccctcatcgactccttattccttgtgcgctggtggtgaagccagaggatggagacgtggtgcacagagggagagagctcggccaggccgtagatgtcgacttggaggccggtgatggggcgggtggtgactgagatgaaggggcagggcggcaagccggacgtgttctggttcccggagttgttggacatcttcgaggttgttgtctcacgtgaactggatatcgtagggattatgagatggggtgggagggtgtaaaaaaataagaaaaataaaaaggggatgtaagacaggggaagacgcgtgtaacaactctcgattgaatgagaaagggatgtactaataataagctttggcgggtttatggtttatgtgagttcctcatcctgcatgggatgaacgaacgaacggtcgggtcgtcgtcaatgaacaaactacctcggcgctacgggtaacgataagaatagctcccgataagaatgttatttcctaccccgcgtttttccaacttcctacctacctttgtggggcccgacaaacctggccgggtggaccctcctcttcccgcttggttcccgggccgagttcaattccgcccccgaacgacggataggtacatcccgacaaggctgtcgtagatcgtaagatcccatcttcttgaactgacaacacgaccaaaaacggccatgctaattttacacttctttctcgccctattctccaaaatgtgtaaaaaaaaaaataaaaataaaaaaactcaccagccagcctagaagtggcaatatcatctgatccaatacacgtatggctcttctgcctgttggaaagacactcgcaagaaaagatttatcagcccgtcagagtcacacaggccatccgtcagtcagttgcagtcatcagcacaagtcctcaacatacctacctacctacctacctatctacctagccttagccaccaacccctccatgcctcaggcacatctacatctctagttccccccttccaaaaaagatctgcagttcccgtgcccctggaacggcgcgcgctgcaggcaggcagcagggatcaccattcacacatcttctgcccaagaacaggggcgtacgtcaacccgatgatgtggacgaccccgtcatttttaaaacaaagccaccctacatgaaacaaaaataaccagcaacctgatacgtgcgtatcttgacaaagtattctcacatcgtgtttgtacatgaggctatctaccagtgattatcgtgttccatctagcgtcgtccacgcttatggccaaagagcaatcaccaccaacaactccgcctctttcaactgacagaatacactactacatccttttcctcttccatacagtgaacaataagaacaaagcagggtttgaagcgcagtacagataaacagcccatgaccataggtccatctgaaaaaacgcccgttctctccgtttaaccccatgtaaaaccccgtgtaaaagtttccagtcttgtgaccgtttcttgcctatcactgccacccaaccaaacccagacgccctaaaaggaacattgtatagacccagcaggaaatgcgatgtcgctcaagccatatcgttacattaaaaagaaatagcaaaaagagtaaacgaaaaaaagaaacaaaaaaataaagatggaaaaaaaaagaccaaactcctccatatgcaatgcgttctcgttgatggtcgacctgtccgtgaccacaaagagatgggaatcgtaaccggtaaaaatgcccaggccaaactcgaacagccaagctccttgataaaaatagagccgtgaaaaaaaaaagaaaaaaaaaagggaacacaaaagaatgatgtatgtgctgttccctcgtctaagcagaatacagataatgctcgtcgccgtcgatttggttgccgtattgataatcgtccagatcagggtagccgggcgtggagatgcgaggatcgagataagctatattgtcgtcttctgttccctaaatcagttgtgacgtggctgcaacaagggaactcgcttccatcgggaccgctgccgccaccgcccgctcggcttcgagttggtggatccgtgccagaaagtcggctgtctgctggttctgcatctggacctgcttctgcagctcctccttctcctgccgcagcctcttgacctcttcccgaagacgttccgtctcatcgttctggtcgtcacgtttgcgcttggctggacctagaacgagcgctgttgagacgtgatcgctggcagcatcatctgcatctccttctggcgaccctccattctgcgtatgcacacgccggaggtgctcgttgagattttcctgacgagagaagcctttgccggtggcacgcttgcagttttgatgtggacagttgaacgagttcttggggccgccatgcttctggtggacttcgcgctcatggcgcaatagaccacccgaataagtgaagcctggcagcttctcacatcctggagccagacatttatatggccggtcatgcttgtccatgtgcttgctgcaaggggtgttggtcagtgtttgatcgaggtggaggagaaagttactggttttggcgatacaaaaaaaaaaaaaaagtcacttacctccactcgcatttgcggctgaaggttctggtctcctcaccacatgacggatatgtgcagatgaacttgccctcgtggttctttgtctcctcccgatgtggttttgggatggccttgcttcgctgaggagaagtcgcaacaggcgagtcttccttcacggccagggtgggggcaggagctggaggagccaggtcgaggctgggggtctcctcagtcgagaccgtcacgtcgacgaagttcttggcatcaacaaagggagcggcttgctcagcaaaactggccacgtgagcgagctcgttcaccacagcatcgtgagtctcagcgaagcggtcgacttcggcagcagcagcagcatcgtggtgctcgtggtgctcgtggtgctcgtggtggtgctcatccatgggcggatagtcgctctcatgcatgaagttgcgggcctcatataccacgctcatcttgaatatgggcgagttcgaaaggcaaaggtggtgagataaacggtgggagcaagagtcgaacaggtaaaaagataaaagtcgttcgatgtctaggtaaggatggccgctctcgagcagataagtaactgatatgaagctacagcttcaacgactttgtttggacctgagcaaaagtgagaggtgaggtggtgtgcggcagtgatgtggcgtgcaacagaggcggggttatcggtccacacgtattggggctcgacgcgtaataaggatatggcctcggtcttggtggtgaagagaggtgggatgttgtcgtcgcggggtgttcctgatctagaaggaaagcgatgtgttaatgattgaggcctgagatgtcaggagaaaattcgtcgaagcccagtcgagctcaggcagaataatgcttggcaaaaggcacagcctgtcccttgcaccagcggggccacttgggtcggtttcaaagcggagcagccgggacaaccaagtgccggcggaagggtacgtactcttgtgcagtaatcagcacgtgatctaatcgtaggcccaaagaggccgcctacgcctcgacgtcggttgacctctggcggatcaaacagctctgagatgctctctctcacgatttaacaaggtccagatggaaatgcaaattcaagactgcgcctttacaatttgaacctttggaaataccgaccttcacagccatgcgggaagaggagatgccaccctattagtattttttgacaccctcttgtcgacgcaagttctcaacttcaaacggatgccaccctggtcactcaacatgaggcagccatggccaccccatgagtcactcgcacatcaacaccttcacaggtccctgttctaatgtacatggactaggtgactggcggctgcagccttgctctacttgtccacggctgcaaaagatggcttccgactaggaaccggtggcgatcatccgcttgctctccaggcactgggccctcgcgctgcaagctcgagatggggcaactttgactggccggcagtgctcctaatcctcgtcagcctcttccggataccggttgtgacttcgagcgatatgcggctggatcagaggccaggcagccaaggcagtctacagcagggcgactgataagacgaaacaaagatgtcctcgtcctcacattttgagacgccgcacagttgagcaatagcaccaccgttttcattgttcaaggacggcctcccgcaatttcccagctgtgaagtactgaacatcagttcagcttcacctggtcaccatcctaggtgtcctcaacatggagtgtcaagactatggattgcgtcaggcctctcaggcacctgtcacacgacttgtgagcccaactttccacgcatggcatggcatcggaagtgtgatttagagtttgggctgtgaagctcgcggaaatcccggacagtctcagtcaccgagggcctcgtttcagagcgacgcgaattccaactggttaccgaagaatccttaggccatgtgttggtgcttatggcattctgagatccttctggaaaacagcacagccatgatatcctcgatatgtgacatttccaaccatttacgatgagtgctgtggggctcggtggtgccaacttggagcctcaccgcgcccaacgatggtgttggatatgcttatcacaacgtccaactcgacgctccggtatgccccttcagactcggttcaatattgggtgcactgccggtcacagtaatgccatttcgaggaaaatcggcgtcgacttttggcgccgagtgactcagccctacccaaccatcgtcacacaccggcagttttggagagctcgagggggttggtgatggaaggtttcggactggttgccttcacaccgcacagtccgcatgctgagcgagagaacggaaggtaggtgaacgaaacaagtcttatcctgcaaggcgcatgcttccccgggcccatcgtgggcctggtcgcctcggggtcagtcttaccttaccttacccacgtctgcctgtcaaggtgggactgagtaaacagctctacagtcgtcataccagtcgtcacagtgcccaccaatgtgtacagcacaccactatcacgctaggtaaccctctccgtgctctgcagtgtcatccgtcgttgctgttgtcgtctgcaggacgtcgtctacaggagctgttgagttctctaggcaagcggtccatcagtcaggttcccagccccccttcatcaaggcgaagctctcactgcggacactgtgcagagaggttggaaggttgaaaacacccgacctgtggaaccatggaatattccccggttgcccaacatcacaccaagacgattcttacagggccgaaggtgacacgaaatacaggataatttgccttactgcggggagtcactgtcctttaactattctaacctgatgaaacgccgaagtcaggtatacagctcgccttgccttatcatgaggctcatgttcatctattcacacccgtggcaaggtaagcatggcgccttgcaataaggcgcgaggcgttcaactctttccagaaagatgtcgacctaaaatagatgtcgaggagatgactagacctcttgcgcaaccggtggtggttgttttgcccactatatgtatgtatgtctaaggctcaaggctgtacatgtcaggcagtcccaccgagcagacaacgaatgaaattttgtatctcgggccaagccttttgtctcatgcatgcactgctgtagcctcccccacggggtaagaatgactgtttaggatgctgacaaaaagtcatcggccggcttacggagacgggggaacggacggatgtggtcgtttcgataccggcccgatcccggggggtggttggccaagccttcgagaagggttgatacacgtcagagtgggttgatgagtaaggctaggtgagattgtgctggggagtcggtggtgtaagggcttttttttttttggggggggggggggaaggagagggtcacgatggcaggcttacggcaggttatgttcgtggtagtctgcgggtttggcttggttgtcatgtctaccatggttggcagtcatgtaggatcggatcatatcatggggttgaggctttgggattggccgtgaggatatggtgtttagttaggtacttgtgtcttccccgcttgtggtactgaagatgtggtgagatgcggggaaggttagataggagtggtgatattctccgattgtatatcttgtacaaacatccaatggtagaagtttcacaagactttctgaacattgtctatcctctgcgctgcctaaattatgcacctggatactaacctggacttgttgtgagagaaccaaacaccaatccaacatggcggacgtggtcaagctccctgaaccctttgcttccagtacgtaaaactctcacctcttcatcacattttcttcccactcccccacaacgctcacccattcgtctgttcacccccattaactcggctttttttttctttcctcctccaagtcccccgaacccccctcaccctcggcccctccccaatccaccccctcccccgcctctcctcccatctcgggggcaaagtaaacatatacgccaaacgcgaagacctcaactctgccctcgcctttggcgggaacaagacccgcaaactggagtacctcctccccgaagccctctcccaaggctgcgacaccctcatctccatcggcggcatccaatccaaccacacccgccaagtcaccgccgccgccgcctccctcggcttgaacgtctccctcatccaagaagactgggtccccggatgggaagatgcgtcgtatgaaaaagtcgggaatatacaactgtcccgtctgatgggcgcagatgtccacgtgataaaaacagagaatttcgggattgggcacaaggagagcctgaaaaaattgaggaggaggctggagggggaggggaggagggtgtactacatcccggcgggggcgtctgaccaccccctgggggggttaggttttgcgaggtgggtttgggagctggaacagcaggaaagggagatgggggtgtggtttgggacgttggtggtttgtgctgtgactgggagtacactggcgggggtgattgcgggggttaagcatcaggagttgaaagggggagggagaaagaggagggtggttgggattgatgcgagtgctaggcctaaggagacgtttgagcaggtgttgcggatagcgaggcagacgggggtgaaactggggctggaggagggggatattaacgagggggatgtgacactggatgagaggtttcatgggggggtttatggtgttccggacgggaagacggtggaggcgatcaagcttggggccgggctggaggggtttatcactgatcctgtttatgaggggaagagtttggcgggtttggttgggatggtgaaggggggggagatacgagagggggagaatgtgttgtttgcgcatttggggggtcaggttgcgttgagtgcttatggggatatggtttagggggagtgccgtagaatggaatgagatgggacagagaagacttgaggtttgaagcaagaccggggtttcacatgctttgtgattctcatgaaattgagcgtttgcgtgaagctgggagatagtcaaagatatatatatgtgcccgaaagctgaagctgtcgtgtcaccacctcctcgctcaagaatgatattatgcccagacaaagccaatccgcggccagctgcggccctcacaccatggaaaatgatattcggctgtcacttccccgtccagaggctgaagagcaaccccccacactcccacctctcccacttgctgtgtctttggttggattttcctgcggcttgacttacataaccgaatggcaacttccgcgggtgtgatgggaaacttttggcctggaacaagcctgatgtggtccaaagccctggaactgtggattttcatctgatggtccagactctagttcgctgtggcttcggagacgacgtggagtgattggactcaacaagtcgaaaaaggttgtcagggttattctcggccccggcttcttgggatgtcggcccgctttttttatcacgcacacctgcacccataagttcgggaccatctcgactttttttttttctgattcccttctgactcttttgttttcgtctcttgtccaatatttctccttttgactcttgtcgtcctgatatcgtcacaggaaacgacaaagacattcaataccaccaccaccactaacaccaccaccgccaccaacaccacccccatcaaacccctccaacccccaccatcaccatctgctcaaccaaaccacccatgacatcccacgatccagacccgccttctccccccgccgacctcaaggctggtttgggcggcacaggtcacatcaacatcgcctctcctgctcaagaacccatccaagactaccccattgagcgggtagagcaggtgtaccggtacgtcttccccttctgcccatcgctacctctcctcgctgacctccttcttccccagcaaactcgacctccgcatcatccccgccttctgggtcctctacttcctcaactccgccatccgctccaacatcggcatagcccaaacaatgaacgcctccgtcaagcacgacctcgtctcggtcctcgggctcacccccaaagacgtctccaccgccctggcactcttttatgtctcctacgtgctgtttgacctcccctccaatctcatcatgagccgtctctcccctcgggtctggatggcgcgtattgtcattgctgtcggtatcatcgggacgtgcttcacagctgtgaacgacgcctggtctctcaagctgttgagatttctgctgggcgtggtgattgcgggcatgtggcctggtatggcgtattatctcaccttgttctacccaccgagcagaacaggcaagaggatcgggatgtatttcaccgctgcgcaggtttctgccgcggtggttgggttggtgtcggcggggttccagcagatggatgggttgggggggttggtgggttttaggtggatgtttttgatttatgggttgttgggggtgattttgggggttgggttgctgtggtggttgcctgaccggcctttggctccgggggaggtgagggagaagagttggtgggtgaagtggttgccgccgagtccggaggcgctgacgggggaggatgcgatggtgcattatcatgatttgaggagggtgtatcacgccaggccgtggacgctgaaggatctgtggtttgtgttgttggactggcggttgtggccgttggtgttgatgtactttggggttgttggggtgggtattgggacgcagttgtacgggagcgtgattattgcttcgatcaactcgaactttacgggggtgcaggttagcttgttgtttgcgcctatttggattgtaggtttctttgttttctttttttttgttttttttttgtttttttttttgtttttttgttttgtttttttttttttgtttttcttttggaagagacgagattgagaaacgtcgtactaacacaggcacagatggacttgatcgctattctcctcgtcacccctatttcggatcggttccacaagtaccgcccccttttcttctcggcggccgtttgtgttcagatcgccggcctgctcactgtcacctttgctttggacaaccaatggggcagatacggcggtttgttgctcatcggatttggcctcggtcccacggttcccatttgcatggcctggaccaacgagatcttccagaagcgtcaccgcgaagttggtgttgctactgcttccgccttggtatctggcctgggcaaccttggaagcattgtcacgacatacgccttgtacactggctggcccgaggacgcggccccgggacggtaccgctaccgcaacagcaactttgtcatgattggtattctctgcatgagtatcgccagcagcttcgtcatgattgctctgctcaaggtctttggcaatgagcccagcaacaagattgttggtagtgacggcaacgactctggagaggagattttggatggtgctgctcgtcgtgaggtgcaccagcgcggtttcagccgcttgatcaaataatttgatcggcaaaatctggggacgagatgagctcgcggttctgttgtcatcgctgagttttatgaagacgaagacaacatctacttcaccacactcttttacgataacttttcggaatgctttcacatatgacccctctggtcatcaacagcttctattcttcccaagagggtagaacagcttccccacaccatcggaaacgaaaatgctttttacgctatcgtttctcgaaggttgggtaagcccagaaagggagccctcgacacggcagtccaagtcagagaagaagacaatgctctgtacgctatctccttctcagacgaagattgccaacgtcggagggatctgtttctgtctctttttttttctgcttttggtcttggtgtttgggttgggctgggctggtttggcttttatgataccccatctgtgttgaagatacgcgctgcaatattgacgaagaaaattatgaagttattcgggactattacgaagaagagttttcttcgccggcgaaagtgcttttacgccatcgcttggacggcgtgtcgaatgaccgaggtgttgctagatgacgacaatgctttttacgctatcgttggtcggcctcgtgggagtttttctggatattatgaggataggataggcgggggagggctggtcgctcgtttttttttaagagggggggggagggtgaagagagagaaagaaaattgagtctgttcccctgtctactttgagtgttgttgatggtgcgttgctgtgtgattgtgtgactgaattaaattcccgttcactgactgcttcttttgctgttggcgtcgaaggttgggaagtcgcaggacgaaaagccggagaaaagtagggagttcaaggcagcaagtcaagtgcgagtaagcaggtgatgaaaggaaagaaagtagaagggtgggtaggtagtcgaagcccgggatgtcgaaaaaaatagtccctttgtcaccctctttgctgtccttgatggattggttctcctaaataggagagagccagtggactgaaaagatcaaaagctcaccggccaactcttagaggtggccggctacgaaaccctcgtagggtttacttcgtcgattggggggtgggctgttgttggttgatttggggaggtcggtcgatatccttgaaggccatctcgaaagacagggccgcgttgaggaggcgaacttaggtgtccacggagccttgttttcaaggggcattggttcgttgcctgatccgggccgcctacgacttacaccgttgagctaatctgaccattccagttactagatttgttgcgtaggcggttgttggaagacggttgcggggaggggtatatacaccgtggttgaggaggatgttgacttggtggttgtttacttgtgcaagttgatcccattactacgaccgcaatactggcaatcattccagcagtacagtgctctcaagttaaagcaagtccctcatctcgcatcttggtctcgcagttccgtagattcttgttgtatttgtcgaacttacacatcaacgatttcatcctggattgtcccatcacaggaccttcttcgacactaaaggatcaacctcgaaggcgacacgtccatcttctttacataaccacagctagcccttctccagcattcgggcattaacgcgtcagaactgaagccgtcaccatcatctgcacttactcgccgtctctactcgtcgtcccactcacactcaccacaagccaccaccgcgcacacacctttcacaagtcagaaccgtcacttcagcaattcatttctcattttaccatccctctccttccctcatcaccaccctcccgtttttattcacccccaaatctaaaaatgcttcaacctctccgcaaaaaactccatcagcggcaaaacctcctcccgactcctcggcatcccatcatccctcctccccttccacctcacaaccctcagatcctcaaactcttccttcagcttttcctcggcatcatcatcaataacctcccccccctccccacagagcaccaacgtcggggtggttaccttcccccttccaccaacagtaggaattatgctcacgggcagcgcccctcccacactcacaatcccctttaattccctcttttccccctccccatccccctcactcacatccaccaccctcttttcctgccccctccgcagctcgctccccagccccaacgccaccgaacccccctgaccatacccaaaaagaatcacatccccccacccccaccccagtctccccacaatcaccccccctatcagttcccataacgcctccctcgccttttggaatccagggtcctgatccagctcccctgttctctgatttaaaaggagatcatcaccccagtgccaacagccattttccggcaccggttccggtaccagaccctgcgggagggggttcacacctttaaccgtaaccgcgtacgttcccggaagattcaacgacttggggaaattacaaaaagacactgggttgttgcctagaccgtggaggacgatgagaaaaagtggttgttgactctgggggtgagggggggtggagctggatgagggggaattgggaaaagtttgagggggaggggatgcggggtggcattttttttttgatttgatggattgaaatggtcgtggtggatgggttgaatagggtagatgggggttgtataggtaagtaacttgtgagaggcgaggtaggtgagaagaggtgaggtcagaaggcgggcttgacaagaccggaaaggtggggtttcggccgggagcaaaaagcgacgacgtctgtctggcggaataaaaaaaaaaaaaaaaaaaaaaaaaaaggcggataaaaagagaaatgggatgtgagagacaagaggtggtaaaaagggcatcaatagcaaaaatacaaggccttgatttcgtccaggctcgaactggagaccttcagtgtgttagactgacgtgataaccaactacaccacgaaacctttgattggttgttgctcgagcgcagaattagagattctgtggggacgagaaggtggtctccaccaggggaaacagaaaaccatctcccgatatacacgacaagaaaggcgcatcgccctgatattctcctatcaatactaaccataaccatgcttctttattaacccccctcaaagctgtatctaccacctnnnnnnnnnnnnnnnnnnnnnnnnnnnnnnnnnnnnnnnnnnnnntcggcccctccgtcagtggtgtcgtctcctaccagggaacactagcctcatcaacccccatgaaggggggtggggactgggactcgggcattcaagccccctcctccccctcatccgccttcacaaccgtctttgtctttttcttcttcttcttcacaaccgccaccccctcgctcggcaccccctgcgcaacctgaatcctctcattcgccctctgcatctccaacctcaacctctgcacctccttcatcgccagcgccatctccgcctcctccttctgctgcctctcgtgcgcaaacccatcgtccggcctctgctcatccgtcaagctcaacccgcccagcacgctagagttaaactgcaacagactcttctgcttaggcttcttggccgttttggagagattaaaactatcagagttattctccgagtcatagcccggacgagcagcacccccaggagtagagacaccgctgttgccaccactaccaccgagcgtttcgtccgcttcaatgacaatcttctggcgggcttgtcgcgggtgttgagattgttgatgcctggacggccccgagacggaaagtttctccaaatcaagtgacatgatcgggatggcgtcaatgtcgagatccggcccgttttctttttggagaatgttgtgaattggtgtcgaggtacccgtgcggcttgatgacatgtccggaatgtaaaacggatcatccttgttacgctccctcctctccgcttttctcctcgcaacaatgtccgcgtcgaggtaactttcctctcccgcttgctggtaggaactgccgacttcttctggggcatcaaccagcctctcgatggcggggccgctgtagatgctggttggcgctgggcgctggttgtaatacacctcaaactcatcatcaccctgtgtaggaagcatcagcgagtctgcctgtgaaagcaggctgcccaagttgggatgaatgggctcgtcaaggtccagtcctgatgggatagggacattgtactgcgcccccggtgcgaccgagttcagctcccatcccgtgaacagtgatggaatggcctgtgtaagaagcaaaggtgcgtcttgctgaatctcgtctgtggatggcgcttgtccagacgcggcttcggcggtgagtctgagaagctcaataaactcgaccgctcgttcctggacttctaggtaaggatgttgcgcaaatggctcgagtatgtgaataacccgcgccatcagcaacgatagtgatgactttctctcgggggtccacaacgcccgatcatccccggcaacatgggcaaaaagcttgggaatcgactggaggcatgttgccaacacctcaggatagtcaactcggggcacgagacccagcatgttcctcaacgtatcgtcaggcgacgagagctggaaagcgtactctcccaccacaaatgccaacggcttcagggcgccagtgaccactggccgtgaagaaaccgtgtcagtgctgagacgcgagataatcaactctgcagcgcgcacagcagcaggcctcacagccttgacctttacggccacgttcctgagttcgtttccaatcctctccgagatatcgactgacttgggtgacgaagaactgtccgagtcgagatcccgagggctcggaggcggagcaatgcggacgagctgggtcaggacgtcgatataccagtcaaagtcgatcacgttagcgtagttgttctgagagcacatgcccagtatccgaccgatcacgtcgatggtgtagtcgtctggcaaaggggccgtttgctcttgtgacttggcacgccgtccagaaccatcttcactggagtcgtccagatcctcttgtccgtcttgttgctgtgccagagcactcgacgaggctttgagctgcctcatcagccggctgacaatggacagcaggttgtcactgctgaccatcccttgcacgaggtcaagtgccttgattctgatggagatatcctcgctgtcaatgcattccaggataacatcttcctgctcagcaacaagcattggatgagtggtgacaatcctgttgaaggccagcagagcaacatacttcactgatcgccctcgtgtcagccgagtcccacaatccgatgaaaaagccactcacagttcgggtcactgttgattgacaccatgcccctgagcttggacacgcatagtgaggcaacttcttcccgggcagagaaatcttcaccgtcacccaaaatgccaccctgaatgataccgttaatgcattcatacaggagagacatggcaggtgtagttttgacgaggttggttaatggcggcagcagctttcggaccaggcgaggctcgaggggagtcaaagtcgcaaactggacgcaggttaggcaaggaactgaggtgcaggatgtcacataggcgtcctacaagtttgatgagcttgatggccatccagttattcccgccatccaccagcaattcaaacagccgcggtgccagcgggaggaaatcctgcggcctcctccatcccagctcacacaccacgttgacaatagcagccgtcacactcgggtcctcgtccttgtccatcaaccgctctttgatcttgggccatgctgcacgtagcgcctcggggtaaaccagtgctagtcggtaaagagtgaccactgtcttcttttttatggacgcgtgggagtgggtgagtcgtggtagcaaatcccctagcagtgagagagctaatgacggggttactagatgtggcagcgcgacgatcggtagtgttattgtcgtcgggtgggaagaagcgaggtccttcttcagcaagtttgtagccatcatcaggacatcggtatcgggacggaaactctggacagcccccagatatccaactcgtttctggtggtatttttgcgacgacataacctccaatacgtggaaggaggcccaggacatgtcgtggccgttcatctcgaggtagattagtttgagcaaggcagtggccttgaggtctacgtccgagatcagcttgagcgtccgagagattgactgtgtggaggagacgaacccatatctgggcttcttatttcagaccggcattctttcagacaattttgaatgtattccttctcgtttcccttgtgattgcgcagacctctaatgaggtcgtacagtgatttctcgaacctgcaccacgtcagcaccactcatgcttccaagcatatggcaagaccgacatacatggctgtggttttgtgatgtcaaaggtgtatatgtccaataccttattcgtatgcgcttgtgtgggaagactcgaggttgaatatcgcgaagcttagctcgacgatccgcggttcctggattcgggattgaatggcggggatgcagggggcaccgtgctgtgttgtcgcgggcttcagcggcggaaaggggccttgtaggatctgtgaaggaggtacgatgtagggatggcaagattcgtagagggcatcttggtttggtcgtcgtcaatcagctcgcaggcgattctgcgcagtgtttcgtgggcttgcgcaactctcaacaaagctccagggcagtctgatgctgtcgttgcacctccaggtggccccaaggtgggttggccgcacgtcaccgtacagtgcgttccagcgggcagggaacccggcctggcactgtattcggggcggaacaagctcccaccgcggccaaaactgacagggaaggcccgagctttgaaccacatgaaggtcttggcgtttattagaggtccccactctccacatcccgtcccgtcgtcaagtggtttgttacattctgtgttcctgaattccatcatcaatcagtcaacccaacgacaacacattcaacaacagacccgaccctatccgagacacattcccaccgaatatctaatctaatctaatcgaatcaatggcaccgtccctcatccgctcgccggtccagctgccaccggccgaggcattggccctctcccagcaagctcctgtcgtcctccagagctctccgagcaccgtgtcatcatccgccctgggttcattgttttccgccaccgagaagcccgagctatggatacaatacgagaacttgattctttcctgtctccgaactggcgacgacagggcggcacaagaatgctacgatcgacttgctgctcgtttcggaaacaatgaccgagtcaaggcgctgggagggctcatcaaggaggcccaggcccaaaataatggcgagttggaaaaggttctgaaggagtacgaccagatgctcgaggagaacaacaccaatctcgttcgtgaaccacactttcccttcctgctgtgctatccatccaagattggccaggaactaatcccctctccacagcctatcatgaagagacgtattgccctccttcgatccatgggccgcctctcggatgcgggctcagccctggtgcagcttcttgatttctccccgaccgattccgaggcttggtctgagctgtcggatctctacttttctcaggggttgtacccacaagcgatctacgccatggaagaggtcctgatcctggctccaaacgcatggaatgtacgcaatgccacggtgaaacagtctaagccctatgctaacgggtccccttcaggtacatgcccgactaggcgaactgcaatacatggccgccactgcttcgggtgccaccggtgcaccctatcagaagcagatggcagaggccatcaagcgtttctcgcgcagcattgagttgtgcgacaattatctgcgaggttattatggcttgaaactggttagatatgccgttggaactgccaagacgatatgattgctgaccccttttccaggtcacaaagagactgttgaaggacaatgccaagccggcaaagcagtctgacgatgaagacttctctctcccagattccaacaccattgagcggttgaatgaactggccacagccaagttggccgagattgtccgacacagcagtgcgcaagaccgcggttggagggggtacgatgccgccgaggttgcagcagcgcgggagctcctctccgaggatgcgccctcggggatggagaggtgatttcttgctcggaccaaagaaacaacggcatcgcgacaatacccagtgacgcgttcgaaactcgcagacaacgtgagtcacgatggctgccggctagatgaggagctgcttctgcaatgcagtggacacactgtcgcgttcgacattcaacccccaggattattggcgcattcttacaactgctttgctattagccgaggtggtgggtcttgggcaggaagacgtatgagcatcggcacccaacgtggctccagtcaaggaaacgggatgcatctgagctgtgtgtgtgtgtgtgcgggtggggcacttgcggtgcggccctttggagcccaaccggaatgcggctcgattactcttgcagacctgcttctttctcccgaccactcgccggccactttgggcacaaaaaaaaccagagccaccggtctagtctgagcacgaggaggatcgcgccgcccagaagggaaacgccggtacctggctggagcaacgtcaatggttgctctatgacctaatgatgcagcgttgcaaggaacccggacgccttcttctgctgtccttgaaaccttgaagccttagccagaagggtctctgcaggacatgttgacgtgtcggtcgccagagttttggttttgggtacggactgagttgtcgatgctgtgggctgtgggctgcgggttagcagagcgagaaacagagtagaatcgaaaaaggcaaatggagaaaagggtcgacatggcctatatctaagaccacattgtccacgcggtgcctcttgcgcaagctcctccacatacaaacccctgcttccctgtcacgaaccaacaaccgaaaatcgagatccggcgcatgccgtttgattgccttgcgaagctgttgcttgatggtttcgcatccctgtgcacgcattcttgtttgaactcaacccacgtacagataggcaacctatccatcgagagcaccggatcccttcgttgcgggagtagggtcgaggatgtatgcgcctagcgggtgatgattctgtcattcatgcctcacccatccatcttctcgttgatggctgctaggcgtgggagaaccggaaggaagaaggactcaccgcctgacgaatgcggcttggggccgacgttgcaagctggcatcgggctccggggtcttcccggtacgggcagccagcaaagagatgcacacaatccgagagcccggccgattagcccagtgacaggccaccgtttggatgtgtacggccaagatgggatcaagtcagggtgtgtaaggggtttcctgtaggcaacacaacgctccgccctcctgtttagtgctactgcagctcgagttgtcccctagcatttctaattcagcctacccgggcgtacatacactttattcgcattgccttgcctgctgctgcttgcttccttccatggtgctgtgtcgtgtctctaaccactgaccacaaagcaaacacacacatacatgcggacagaacaacatctcaacgtagacgaacttttcttttttctttttttcttttcttgcgtccgcctgcttgactgatcggcccgcgcactgacaacacagaagacatatcaaaacttcccatttccaccctccgattctgtcccacagaaacaccctcacgagctacaaagatacctgccgcaatccaacgccgcacgctcgcatctctcgcaccacaccatccacggttacataatctaatcatagcctcaccgcaactgagcactcgacgacgaagacgttgagcaacgctcgacgaggacgcatttgccgccaatcccaccgacactgcgggaacactgaaaccacccccaaccaaatcatagccttgtttgcttgctttgaggtatgggtcattctctcgtcttattctcattgcatgctttttgttggatcacttctctttttatccatgatcggtccctcctggggctgcatcaagcacagtggccattccgttgttcttcatgaacggccatgcagaccaaccgggtgttgagtcgatgccctacaggaacaggaaacaactgcactggacagccttggcagttagatcgtcatgggcaataccacactcatcatcaccgagagacgggaatggggaggcaaacttgccccgtcaaccctgtgcatagttgagcacctgatgatgatcatgatgatgatgagggtggtgagggcggtaagcagtggtggtggtggtggtggtgtttaacggttcacagccctgggcccgtttccactgccgtcgcggggattccacgttccatttatcgtcaaggtcgtctcgagccgagagaacccctcactgacgctatgctagtattgaggcttatacctacctctcttaccttggcgcccgtgctgcgtctcgagtccttgacagacaagagtgtgagttgcggttcctgtttctctcctggcgcggtcagcggtcacgagtgttacccaccacaggcctgtctggtctggcccgacactggcttacactactacaagatagagaagcacatacacaagcagaataaaggtgggttgcccggccccggccccctcttcctatatcttggtgttctccccctcctttccacagatattcccgtcctctcctttccagagtgctgggtccatcattacacacgctgtcccctctccctctcttccctctctcctttcccccttaaccctcgccctcaccctcaccctcctcaccttggtcgcgatggcgaatgaactgggctagacggcagtccactttctttcgtcgtcgcactgagagagacagggcctggctcactcacacagcagcccctcattgtggatctgatctaggcgttttgtgcataccgttccctgccgctgaccgctgaccacggaccaccccttccccccagcaaggacaactctctcaacccaagtccagtcacaaaccaacccgatctctcccttttttttttttgcgcccaacccactttatttatttttcgcccgtgcattcgtcccaagttcttctgcctcttttttcacccgaactgaaagaacagacccagatcatctgagagcgattgcgattgatacagcctacccctgacccgaccaagcattttccctcaagcgttcttgttgaacatccaccacagactccccaagactccccagactcctcccccgctcccgctccctactctccacccaccacccaccagccggtagtgctcagcccagcccagcccaccacgagacagcgataaacgagagacgatatctataagaacaagaatactgcgccaatttcattccccttcaattacttgactcccactttctcgacaacatctgttgcggatcaaagggtgacggtaacagataggaaccattcccaatgtcgtaagtagacacacacacacacccctggcctggacggctctggaattcctcagcccgtgccaccgagagctgtgccgcaactcacctataacacccccctccaataatgtgtcccggtttgactaacccgtcgcgccctgttttttccccctcacgttagaataagaggacgatccgtaacaataaacacacgcagtcacagccacgctgcaccatcgacatcttcagattcatactatactgacgaggactcgtactcgcaacaaagccacgagtacagcgaatcgctcgctgacgacgacgacgaagaggaagaggacgacgacgacgaagacgagtggggaggagaatacgacgacattgacccgtcggattctgcatccaccgctcaccacgagccctacaagcgccccatttcccgaaaccacagcggcaccggcagaccgcacagcggctcccgacgtcaccggcttccaccaccccagggacgccagtcggcaagctactaccaatcaccccaagcgcctccaatgagcctggacccctcggacgaatacggctcgacgtatggtcgcccaagctatgcccacggcccaccaccgcccaacaacgtcggcgcattctacggaaaccgaggtaaccaacccccagcagggtatgcagcaagtcacgtaggcggtttcggcgcaagtccatacggagccggccaaatggttccctacggtgactattcgaatcccttcgcgcccatgcgcggcgccaacgggccccctcaaaatgattactacaacgatccccgcgcactcggcccacatggtcaccagtcgggtccgggtccgcagcactacggacacggcatgatggccccctacaaccccgccggagcggcggcctccatgttttacggtgctcaccagggctatggtggcatgcctccacacatgcagatgcacatgtatcaagcaccccctccaccgccaacagaagtcagccccagaccgacgacacccgcacccgcccctcctcccaagccggccgagccagacccggctatgctcaaactgcaagccgaactggaagccttcaagaaggcccagaaagaaaaggaagaagcggaaaagcaaagggcactggaggaaaagatccgccaagacgccgcagaggcctaccgccggcagatggaagagactgaacggcagaggaagaaggccgaggaggaagccgccgcggcaaggagaaaggccgaggaggaggctgccaggcaaaagatggaacacgaaaggcagcttgctctcgccaaggccgaagctgaaaaggcgacgctggaaaggttggagaaggagcgaagagaggccgagcagaggaggaaggaagccgaggaggagcgcaagaggcttgagcgggaggcacgcgacaagtttgaggccgagatgagagctgctgaggagcgcagaaggcgcgaggcggaggctgctgctcttgctgaggctgaagccaaggcccgtgtggaaagagccatccgtgaggagcaggagaagatggcggccaagatcaaggctgaggaagaggccaaggctgctgctgctgcgaaggcggccgaggaggccaagaagctcaaggagctggaagaagaggcgaagaaggctctggaaagggccatcaaggagcaggaggagaagctcgcggctgctgtcaaggcggagcgcgagaagattgaggctgctcagaaggccgaggaagaggccaaagccgcggcggcgaagaaggctgccgaggaggaggcctggaagaagaagctggagcaggaggctcagatgaaggcagagctggaggcgagagagaagattgagaaggagaggcaggctgccgaggcggctgctgctgccgccgccgcggcgaaggccgccgaggaggccctcaagaagaggctgatggaggaggccaaggtgaaggttgaggaggctgtcaagaagaaggagaagccgcccatcaggtttaaggatgctgtcgggcgcaagtttagcttcccctttcacctttgcgccacttggacgggcatggaggagttgatcaagcaggccttccttaacatggaggtcattggccctcacgtgcaggaagggcactacgacttgatcggccccgacggcgaaatcatcctgccttcggtctgggagcgtgtcatccagcccgactgggccgtcacgatgcacatgtggcccatggagaagcaccccctccgcatgcagcacccgggtatgccgcccccgggcatgcaaatgcctggcatgccccccggaatgggccgaccccaaccccaaggtggacaccacggacatgggcaccggccctccatggggataccattccggccactttcccgtccgaacggtggacaaggcggaccaccgccccctcctccgcctccgggcggcatgccatggccgcctgccggtggcggcatgggcggcataccgatgcccggtcagggacaacgtatcagggttccaatgcccggaccgaacggcgccgttgttgtgacggcggatccgccaaaggtgaagaagtccaagggcgcgccgacgacggtgctggggtggatggcgggcaagccgaccaagagcagcgggaaaaagtatgttgcagactcctccccccagattgtggtatccaaacctgtcgtccccgagaagcaccgagcacattatgtggagtatgagttgaagtcacggagtcgaagtttgtcgttttaccttgcccccctgtatcatcatcatttatcacggatgttttttgagatggcactgtgctgacgtgtattggtgcaacaggaagaaataagcgttgagttacccagacactatcgaagataacatccctcgacttactcacccgatatacaacctttctctcatcaacatttctcgctgcttttttttttttgggtttctctactcagtttgtgtctacagttttttttttggctttttgataccttgtcgcttatttttgcctcgcagggttttttcttttttttctttcagtataacattttgaaatttggacggtgggagagatatacgaggtatgatggaatatgatatttggatatgacggaaacgaaacgtatatggatggatggatggtcaagatatggagatgggtatggaagatgatggtgggtggcattagtttttttttcttctttttttctccttcttctcttcgtttcggcccggcgcaaaaagctcaagcatcacatcatggtcaaagcatttgcaacaaagcgtggcgcgacgggcgagtggaatatttttgtttttgtttttttggtttagtttgtgtggtggtggtgtggtcctagatgctttttttgtggtccttcgttattttctgcgatcttctaggctggttcgtgttgtgttgtttattgtttactttttacgtattataaaacaaaaaatgagaagtacaaaaataaaaaagggtcaaaaattgttgttaatgttttgagcgttcggtgtgattggtttgagtggttgaaggtgtctatgtgttgtgtgtgtgctgagtatcgcctgtctaactccttcgcttgctgtctatctctattgtacatatttttacacttttctccttccaactcccagctcgctcccttctacgcctgtggtgttacatatccataaccatacacccttcaagctccttgtccccatattcttacgcctttgcccaccctccggtacctgaaccaccagaactctaaccaacttcccaaccagagtagcggcggcaaagtgcttgtcgccagagccggcccggtgactttgcttcccatctactcccccaaggtagccactcctatacacaccccgacctgtggccttccccctcgtccgcaaacctccctggccctcccctcaaaagcacatatcatccgtcccaccatctcatccgccacggcccgaaccgcgagcccgacagccggattcgcaaaccgaaacctcaccaccaatttcacctccgtcacccccccttttacttcccgcaccgtccacttcgtgcacaaactctcaaacacccccccctccaacccctttttgtccccctctgtattctcatacccgtgttttcttaggacgtcaagcgggatggtagggctggcgtttccggataccgcctcgacggtggtgcaggggatgcagtacactctggaagtgtaggattgggtgatgggaccccagccgactgtgaggtcgccggttttggggaggttggttttgggggtaaaagaggtgatgagggagtgggtgcagtgggggaggaagcggtggtaggagtttatgtcggcgattagtgagtagatttctgagggggggtaagggaggactttggttgcggagagagtggttattggggcggtggtcgggaggggggggaggagggaggtgaggaatgttcttgaatgggggcgagattgtggttttcgggactggagaggaggtggttgtcgggattggggcgataataatgatgattgttgttgggaggggaggaggagcaagggtcgtcgagaaaggcgagaaaggggggctgctcgtagtcgcaggcttgggtgcattgtgacgagggaggtttgttgagggaggttcgtggtgttgtgcgatcagatcggatggcagatcgcgaaatgggttcgggtagtaggtacctttttggcgggcccgaaccaaggtgcccacttttgagccggggggctgccggccgttattcggactgtgctggcttggggtgacaactatcgatgtcagggatgcttctgaatgaaggctgcatgcctatcttgtgctcaaataacaagtgttaagcttttccggtgttcttggtcaagctcagaaaaagcccacttcagcctggccagtcatcagacacatgtttgaaaggaacaaaacctctattttttcttcgcggcctgcgtctgtaacaaatgggagagcaatccactggtagcgtccatttcgctggtgtcatctaagagctatctcttgaatagcccgaatcacgcccagctttacccccagctttacccacagcattaacccccatcgctaccccatgtccagcatcagctagagcatcaactagagcatcagctagaaaagcggccagagcattgctcccggcattcatcatagcattttccataaaaccaagcggcaaccagagcatcagcggttgaggtgtaagtgcttcgggcatagatatgattggctgagccgtctattgtgggttccaactcagtttcagaccacaacgcctggaacaggccgtgtgtggctacactcagctggcaagattgtttggaactgccataggtacaggtgaaatccctgccacttcaacccctccgagctgtctgtgcccctccgagctgttgcccctccctattgcatctttgcgtcttgcacgacaaccccctatcaaccacctaacctatagccatcattcacgatgggaggccatctagtgacggttgcgacatgcaacctaaatcagtgggttctcgactgggagggcaacctgaaccgcatcgttgagagcatccacatcgcaaaagcggccggtgctcggcttcgtgtcggtcccgtgagttgtgtgtcattgatgataagcaagtgcagctgtctaacttggagataggagcttgaaatcaccggctactctgcgtacgaataaccagttaccacctggaattcccatgactgattcccgtccctctttagcttggaccacttccacgagcttgatgtctacagtaatggaaacccttgggctttgacccccgagcctttatggaccagagttaactcttgtgtctagctcacagtctggagatgctcagcatcctgctccaggatgagagcacccatggtattctcctggacattggcatgcccattctccacaggaacctcagatacaattgccgggttatttgcctcgacggaaagattctcttgatcgtgagcctgaccactctcgccgcaatgggcatccgactgatggttactatgcagagaccgaaaatgtggctggccaatgatggcaactacagggagatgaggcactttaccccctggatgcgccctagagagactgagctgttccacctccccaagatgctggctgagctccagggtgaaacccacgtcttgtttggtgatgccgttatttccacccccgagactgcctttggtgccgagacctgtgtaagctgcaatggtggcgagaaagaccatggttcgaggacactaatgtcttgcaggaagagcttttcacccccaaagctccgcatatcgtgggtctcccttgttgccaacttggagacatgatgttgacagtctcacaggacatggctctggatggtgtagagatcatcaccaacagcagcggcagtcactgtgcgtctcatcatcactttgttctggacataaaaagctgacagacagccagtcaccttacggaaactcgacactcgtcttcagctgattatggaggccaccagaaagtctggtggtgtataccttgtatggcccctgggtgttgtgtgaatgatccgttggagctgacacgttctgcagtatgccaaccaacaaggctgcgagtaagtgtctctgaaaagtctggaccgctgcggctaacaagcacagtggcgagcgcctgtactttgacgggtgtgccatgatcatagtaaacggcgatattggtaggtcaccttgctcatcctcccgagccctgctgacaccgcacagttgcccaaggatcccagttcggtctcaaagacgtcgaggtggtcaccgccactgtcgacctcgaggaagtcagatcatatcgagcagccatctcccgcggtctccaagccgcgacctcggatgccaggtatcaaagaattcagactccattcgagctggctcccgaagatgacgacgccgatatcgaaaagcgacccaccctccccatgcagcccagagtgcaccccgtagaagaagagattgccctctctggcggatgctacctctgggactaccttcgcagatccggaacggcaggctacctcgttcccctgagcggcggtattgactcgtgcgctaccgccgtgattgtgtattccatgtgccgcatcgtcatggatgccgtcgaggaggaaaatcaacaggtcattgaagatgtcaaacgactttgtcaatacagccagggtgtgttgcccaagacaccgcaagaattgtgcaaccagattttcaccaccatctacatgggtatgaagaagcagagctctcgtgacactcgccagcgcgcaaaggatcttgccgaggccatcgggagtcaccacgtcaacctcgatattgacgaggtatacgaggctcagaagaagctcgtcgtcaacaccctcaattttgagcctaggttcgaggtggaagggggcagcaaccaagaaaacttgacgctgcagtgcttgcaagccagaatcagaatggtaacagcgtacgagtttgggcagatccttccaaccgcgcgcggaagaccaggaggcggcagcctgctcgtcctcggcagtgcaaacgttggagagtctttgaggggatatctgaccaagtatgactgctcgagtgcggatatcaaccccatcggctccatcgacaaggcggacttgaaacgtttcatcgcatgggccgagaaagaattcgacctaccctgcctccacgaattcctgacggccgttcccacggccgagctggagcccatcaccgagaactatgttcagagtgatgaagccgacatgggcatgacgtacgaggagctcaccacgtttgggcgcctccgcaagctcaacaagctcggcccgttcgccatgttccagcgtctcgtccacgactggagcatcgaccggaagcacgtcgagggcgataccgcgccacactacacgcctgctcaagttgcggagaaggtgaagaggttcttccacttttatgccatcaaccggcacaagatgacaaccttgaccccagcccttcactgtaatgattattgtaagttgatatgcactttttttcccgtcggacctttatgattgaccgtgcccatagcaccggacgacaaccgctttgatctccgaccgttcctgtaccctaacttttggaagagctggtccttcaagaggattgatatggagctgaagaagattgaaaagaagcgggccagtaaggggaagtagagcatgatgaggaatagattgtaatatttcaccccgttcatcacctcgacatcaaccagaggaatgctctctttgacagactgataagataaaaactgcttgattcggctagcggcaagagtgggcttggacccggaacggcgcagagtgatccggccaatgagcagccccacagggcgagtttcacagacaaaatgggtctcgatttttccctttctgttcgcactcttccttttcttctcagcctgcaaattctgcagccccgcgcaacaatggtgttaaacatccaccaccactccgccagcgccatccagtgaccggtgccagtcgttagctgctgccttttactctctctttttaccaagagttatcacacgctctttactcgcccatgactgtcgacgaaacagtcgtcgccgtcgccggctccaacgatgggcaggcacagctcgccacggacctctcgacgcttgagatagcgaacggaaccaagcagacaggcgagcagcctgcccatcgctcccatgatccccagtacaaccagaagcgaagcgaccccttccagtttggctcgcgtcttctgggcgaggaggacgaccccttcgagttcaatgcttgggatcatgtcgaggttgacgatgaattcaaagagtatgctgaacagcaatacgagatgcaacgtcaagcccccgtctccgaatttgacaaatgtaagttgcaacaatgttttttttttggttcgcttccacggggcccaaacgcccctgcgttgtgtgatgatttacatttatagcatagttcatctgaattcctttgatgacaactgtagcacatatagtctttcgctcccatctgacacgcattctttccactttctctctttttggcaggcactcgcgagcaatttgctgactcgagaaacacagttcgattcaattccgaccctgcaaagtggtggaacaagttctacaagaacaacacatccaacttcttcaaggaccggaaatggctccagcaagagtttcccgtccttgatcgactgacgcaagaggacgctggacccgtcaccatccttgagataggcgctggcgccggcaacacggcctttcctgttctgtcgagaaacaagaaccccaagctcaagctccatgcttgtgacttttccaagacggcagtcgatgtcatgcgcaaccacgaggcgtacaacacggatctgatgcaagccgacgtgtgggatgttgctggggaggaactcccccccgggctgggagaggggtccgtggaccttgtcatgatggtgttcgtcttctctgccctctctccgctgcagtggaagaaggcggtagagaatgttcatcgggtgctcaagccaggtggtgaggtctgcttccgcgactatggaagaggtgacctcgctcaggtccgctttaaaaagggacggtacctggaagagaacttttacattcgaggcgatggcacccgcgtctacttctttgaaaaggacgagctcgctgatgtttggtcaggcaagctgaacatcgaggccactgatggcgatgccgacgccagctctgagggcgtgaagcccaaatttgagattgaggagcttggtgtagaccgtagaatgcttgttaaccgtgccagaaagctcaagatgtaccgatgctggatgcagggccggtttagaaaggtatgaaaaatatcaagatgatttgagagcaatctatttccgcaatgtctcgattctgtgacttgtctgttgtcgtattgttttgatgtgatcttgaatttgcttgctccaaaaagcttggaccacccgacaggaaacagcttgggtgggggcctgttttcaccgcccgaccctctttctgcatggggcagaattctgaatgcgacagcggccgtgctctctgttcccaatccagaactgtatcactgtgatcgcgacttcgtggagctctccaccgagtttgacgtcgactcggcaacatcttccacaccaccaacgccgaacttcccgctcatgcgacgccaattctttgttccctcggccaactagagccgtctcctgtcgacacacctttcattgcgatcgagcatctccacgagccgacgacagtcttcttctgcctcctcccacggtaaagtcatactcgctcgccatccgcacttcgaaacctacccacccccacaccttgtatgatattccatccgtgacgacgatcgtcaattaatacgcattctgttttccacttcgatcgaccgctcacgcgaaccatcgcgaccgacgccaatgctctgcttccttcaccatggcatcgccagctaacaatcccttcggggtgcccccaggcaatccttttggagcacgaggccagaacccgttcggtgcgccgtcgagcaatccgttcgggggatcttcgtttggagcagcagcagcagcaccaccacagtctaccccctcgttcggtagccaaccagctcagaatcaattcggcggcggtttcggggctgccccttcgtcatttggcagccagccagccgcaggatttggggttccgacatcgtttgggtcgagtgacgggaacaacatgacgcgacggggaaagggcaagatgtcgaccttgaatgcgtccaacggtccgcaggataagggaggcaagtccaaccagttcggggcgcagagcaacaaagatactcggcgtaccaatctgtttcagggaccgaagggttcatctctcaagcgtgaagtcgccaaggtcgctgccccggcggcctctgtccctagcagtcagcgcaagcggaacgaacgaccaaatggatcgcaaccgccaacacagcacagtcgcggcaaacaaggcgcgacacaggggcccagcgaagcgacgagacagctgagccccttcgcctacgactatgccaataagctctacgatcatctcaaaaaggagggcatcaaggctccaacatggccggcccaagttggcaaccctgacaagcgcggtgcggtcgagacattgaaagagtcttacaaaaagtatcgcacccgcgcctatgcgtcacttcgaaaagccgatctcattgacgacccggacaagcgaaggaggttggaggacgcgcttcctttcaagggcatctgcgaggacatgtgtccggagttcgagcaggtctctcgtattgccgagtacgatgtcaagacagaagagaaggacgagcgtgggtggccagataccgccaagatggtcaagaagtttgggcgctcggcggctggtcaggatgcgccattgcccatggacgttcgctctgtggcagctctgaggcgatccaccgactaccttttcaacgaactgttgcagtcggagaacaacctcgcctcgatgcacaactaccttcgagatcgcacccgagcagtacgcaaggacttcaccttccattcgaagaaaacaaacgaagaaatgaaggaactggtgtactgtttcgagacgatcacgagattccacgccacagctctccatctcctctgccgaaaggggcacagttacgagtcttttgattcgagacaggagattgagcagttgggcaggacgcttctgtcgctcatcgaggcatacgacaagtgccggaaaaagggagtggtttgcgaaaacgagcccgagttcagggcctattatcttctcctcaatgcgcacgacccctcgataatgaagaggattctcacatgggggaaggagtactggttccaatccgaggaggtgcagacggccttggcgttgattcaggtcatggacgacattcgggagaccaagggccccctgaagccaaaacggccagtgacgctgtccgacacttcgtttgccaacttctttgcgattgtggaggactccaggacgtcttacaccatggcttgcattgccgaggttcacttcacctgggtccgccagaacattctcaagaatttcgttcgagggtattcccgccacagagatgcgcctcggactattacggccgcgaacttgaacaagctgctcaggtttgacacggacgaggaggcggttgagttcatcgagctccacgggttcgagatgtcgacctgggtgccgcccaacaggccccctgtgacggaaccgtacctgcttctcaacaacaagaagaaggttgttccctcgccgcgagtaccgcaggctttctcgggaaagctagtggaacggaagcgcaccacgcagtctctgccgtatgtcatttacaatacaatctacgaagagtcgacagggggggatgtcggtatggaagacgagctgtttgtgacgcagattaacactctgggtgcgtcttcggcttttggtcaaccagcctcgcagcctgcggcagcgacttcgtcatttggtttcggttctttggcgaacggagtgccagctcaaccgcaggcgccggcttcggcatttggctcttcgaacacaccatccggtgctactccaggcttcggagccccggcaccgtcagcaagtccttttggtcaaccgccaccccaggctaacaatccctttgggcaacctgctgcaccaacaccaacggcaacggtaccagctccaaccccctttgcgggttttggttcaaaccctacacccgccccggcacctactcctgcccaagcgccatcacaaaaagaagcaggaaagagcccattctcgtttggcacgccacagaccgctatattcggctctggggctcctcccccgagcctggcggaaccctcagctccgtctttcggcttcacgaaaccgccagagccagcggcgctggctccgaccccattctcgtttttgaacaaggatgcttcttcggctcagccagcgagtgtgctctcgagcacagagaaggctccgatatttggcaacgatgccgctcccaccaccgcaagcacacagccgactcgggcaccggcttccggtttctctcttgctcaaccaacgcagccaacctcgtcgcttacgttccccggtctcggggcaaagcctgagtctccaaagaatgtccaaccggcgcccgctgctccagcacagcagccagctgtcccttctgtctcaatcacgcagcctacgcccacatctggtgtgtttcctccacaacagccagtccagcccgctccggctcaatcccagttcccagccccgacacccccggcagtaccaccaccggtccagaatgcacccctcttcaccgtcacgccgtccgcaccacaagcaccaccgcccactccaaaacgagacctgatggcgggcttcacaaaatggtacgtcactggtgacggagggctgatggagcaatttgccgaaaacacggtccagaatctcgtctgggatgtctttcagcgatatcaactcgaagaagcggagagggtgagaagggaggaggatgaagagagttggcgggcggcgagggaatttatgtgctatcggctggggcacaagtatttcaatcggtggagggagacggcgaggaggctttcgatgaggaggaggttgcgggaggggaagaggctgatgagggagtggagggtgatgcagaaggagagggagagggagaaggaacaagaggagaaagagagggtgaaggagaggaagaggaaggcggaggaggatgttaggttgctggggaggttggtgaagggtagtgggagggggtgggggggggggagtgtagatggggtttttagtcatgatgggagcgggggacaggaggaggagttgacaaggaggagtgggatgtttgggggcgtggtggggaacgaaggggagctggtgaagagggctgtgatgggtgggtttggggtgactacgggaacggggacggggtatgaggggtatgaggggtatgaggagtcggagttggagcttgtccctgcgccgaaggagatgacggctgggtcgccggacagtgatgctaccgcgcagagagaagggtggaagacgaggtctctgagggagaggtttgtcagcgaccatgggaggagaagcgtctcggctcacagctcgatcaacggacgagcatcactcagaagcacaaacttttcgggggtgaacaacaacaacaacaagaaacggcgatcggcggagctggacgggctgctgcgtgagcctgatgctaaaaggcagtcgtttgccatgagcacgaccagctgtgggagcaacgcttctgcttctcggcccggtatcaggtcgaggcactgggagatgaggctgagggggtttgtgcagggggctgatggggggtgggtggcggagagtttggcgaattcttccgggaatgatggtcaaccacaacgaccgccgccgttgacggagttggagatccggcttgccaggatcaggagggatcactccgtcggtcggggggggagtaggtctagggctgcgtcgcagagcggtgggatggggatgtcaccgcctcctccgccgccgccgctttggggtgagggggttgggaaaaggaaacgggatggggagggggaggaggacagggggaggaagggaggggagttttcgcctagtgagagggagaggggcaggggtaggccgggagcggggacaacgacgacgaaggatatggtgaggatacgcaaaggnnnnnnnnnnnnnnnnnnnnnnnnnnnnnnnnnnnnnnnnnnnnnnnnnnnnnnnnnnnnnnnnnnnnnnnnnnnnnnnnnnnnnnnnnnnnnnnnnnnnnnnnnnnnnnnnnnnnnnnnnnnnnnnnnnnnnnnnnnnnnnnnnnnnnngtcttgcgttgttggtgagggataggttggttttacctggtggggagggggaaacaacggaggggtgggttgcttgaaagttttggggggggggggggggcaagaggaggagagagaatgaaattgttttgttttttgttttgtttttgggggaggatgggggatggggatgaggagttgatgtggaggatgatgatacttgaggtacttacctatggaaattgctggtttattagggttggtttttttttttttttttttttttacatggaagaaatatcaaatattatatgggagaaaaaaatcaaaattttgtgaacacaatgaagataaaggagtgggagttgaaaagacactgcgtggcgttgggggaggtatggtataaataggggaaggaaaggggttgagcattctggggtgtgtcggcgttggtgcttttttggttctttttgcaaagggagcaagcaagcatttctgggggttttgttggtgtccttttgtgtattttattgaagcattaggttttattatgatgagaggataggcaccattccacgtgcatgctttaaatcagctttgaaggtttttttgttcacactctcttatgtgcaatatcatgcatgctttccctgctcatgaaatcaccggtaacacatgatatgtgagatccggtggtgtgttccaaccctaataatgatgatgatgatgatgatgatgatgagaagctagagatattttgtgagtcggtatgccactcagataggtgctatatacagccagcccccttccccgacccccgacctctcaactacgacatatctctgtgtcaaaaccatcaaagattcggagctattttagttatttgttttacctcaaccctccttgtaccccccaccagcccagaaatacaccggtgcggcatctgcaaatcggcccaacagctcggactcaccataatccttatcatctcctctctttttgatgttttaggcgaaacatcctcatcgtcatcctcctcctcctcatcctcctcaccgtcgtcaacatcccccgcaaatctagccctattgccgttgggccatttccagctctggagtctctcctcttcccaataccccagccttggcttttcctgtctcttgggggagacgggggacacgagccaggcttcgaagaattcgtccgcgtcgtctagggaggggagggagtgtggggagaggggcgagaagcaaaaggaggagaacgacacaggaaaagaggtgaggtctgatgaggtggcgtttttgtcgctgaaggggttggaggtgtaaggggatattgaccagaggggtgagggggtggttggtgagcggtagagggtttggggggttgttaacatgctcctttgggggaccgagcggaagggggggatggtgtgagggtcggtgaggagggttagttttggcttttggtggagttgggtttggttttggttgtgggtggatgaggggggttgtgatgggctgttgttgttgttgttgtttttgttgctgttgctcgagttactctgcggttgagaggggccgtttggtgatttttcattgttgttaggattttcttgctgtttttccgacgatgcctcctcctcctcatcttctttttcttcttcttcttcttcctcgttctcatccctcttcttcgtcaccagcctcccccgcggctccccatccgtatcaaccaccaaaaactcctccactcctctccctagcaccccatacacgctcacctccccgcccttaacccccataacagccgagctgcccgcgtaaaccgcctcgtcttcccacccgcaccggttggcaaaaacaatgattatctcctcctcctcagcgtgcccgccccggcccctgatcagcggctccaacctcccaacccaatacgctatcgtctccaggtcgggctcatcttcccttcccgtaaggaaccgctccctcatctccagcgtcagccaggccatgctgattatgaccaaattcgcctttaccgtcgagcaatgccttgcaaactcgtaaagattccaggggttggtgaaattgtacgggttgatgtccatgcagatccccatcgcggtcgttttcccgggaaagactgtactctctggggagtcagagtaaaagccggggccctctctggcccaggttgcgtcggtgtagtagaggaaggatttgcggtagtttgccacttggttgccggaagggttgaccaccaggagggagttgtagtactccccgttggtgtgggattggagttctgggtagccgactgctactgtgcagcggaaggattgggctttttgcttggcccaggaggaggttggtccggtggatggggactcgaggtagggggctatctgggatcgggagcggaagttgtagccttttcgtgcgtgttagttgtccgtgtgggtgatggtaggggagagggataaataccggaaaaggacatctcggggaggattaataagtcgagtccctgatcgagttgttctgatgccgaggcagcgaggactgcgtcggctttggacatgttcttttcaacctcgcccacttggggggagaactgaagacaggctatcctcattttgctgggtgtttgtgctgtgatgccggtgcagattacatggcgattgataattaggtgtttggtgtgttttggtgtgtgggcaggtgatatatgtcgtgtgacgctcggcaggtgagcgagcgtaaatgggttgcaggcccggcctggttgttttgctgggaatgctgccgaaagtgatgattgatgatagttgtggacttcagtcgtagctgagatatggccctcctctaggtgatataaacctcaaccaaatgcttccctgtggcgtagatgccctctcagttcgagcaaggatagggctaacgtccctgtagggaatacgcacaggtcctgagcgtggcccccaactgcccattcgctgtgtggttcgccgtgcggttcgccgtgcggttcgctgtgtggctcgctgtgtggttcgctgtgtggtgtgtgtgtgtggctgtgatatttttaggcactcctttagccacctgtctggtgtgacacccaacttctttttcagattcatcaaacacaccacctggtcttcccacgtttgctcggctgtagcgtttctttcccatgcatgcgtacaagcggcacggactcggagactccctctagcatctcacttgataaaatcagccttcgctaacggaacgtcggaggttccctttctctcggaccacttgtcggacctgcccagaggccccttcggtagatggcatttcacatgccacatcagatctctgaaacaaacctaatcctttgtttcaagagcagtgaaactcatcatcagagagcttcatgatctgatcggggaggggggggggggtgactaccaccggtgttttggaaaggtaagaagcgagtgttacttacgggtatgtgaagaagaggtaattttagagtcaacatatgcatatatcgttgggaaagacaaaatgtcgtcgatgcaagtgagactgtaaagttgcctggaggaggggaagggggacggggaggacggcgaagctgattggccagccctatcgacgccggattgggtctagactttgtgacgtggggctggtctgtgcttgtctgtctgcaaacaccacaagccatcatcatcgtgaatctcgatgtcggaaacttgccgcgcttcaagtggacggcaggaggtgtgaagtgtttgggtacccgggagcctttttgataattcaggtggcgaagaactcatcgtcgagactgtcttgtttggattgggtactgttcgtcgttcgtgtccaacattggatctggtaccacatctcgatgctacctacttagtcgtcgttttattttgagttggctttgaggctatcacaaatcaaaggggtaccttaaacaatagcattggaaactcttgcccccggtgtcacgagagggggtcggcgctagcatgacttgcgtgtcgtggtaggcagccgtttgaaccaccatgaagcgagtgagtgaagcatcagaatctgttgctcatttttcccccctgttgtgagtctggaatttgtcgagcagtttcaccatgagctttgcttttgcttgaacttgcggaatctgagacgacaagacgagggagcaaaaatgtcgtcccaaacagcgagttacatgggagtggtggttgggtcggtgacctgtgagtctcccctatcatatcttctatccatacgaccgaccccctcccccttttgagcagctgattactgctaaccctcctccatagcaaccttctcagccctcatctccctcacctccccaacctggatagtctaccaactctcccaccccagagtctacgaccacatcggcctcttcacccgctgctccctttctgcctgcgtccccttcccctctacccggttctgctcctccctcaccacccccgtatcccatatccctctccacccccgtggcaagcctcccaccccaccattctgcaccaaatggcgctctgccggcttcctggtcaacatatccgtaggcctcagcctcgtctccctcgtcgtcgcagctctcctcctcctcggcaacgcccacgagccccactcctaccgcatgcccagaaagcacggcacgagaatcatggctgttttgatgatgattgccgggacgatggaacttggagcggtggcgatggtttctgagctgaaggagtatgaagagatgttccaggttcctgggtatgaacacggccaggcgtggtgggttgggttgggagggggagtgttgagtctgatcatggggttgggggttgggcttgtgagattgatggacttgcctgagcggacgggagagggtattgatggtgaggtgtaaattgagatggtgatgatggaaaatgatggtgggtgtgattgggaaaaagaaacaagtaaatagcatatgttgatcaaaaagcatcgggcatgttcaacatcaagaaatgtgtcgtgagcaggagcaggagcaggagcaggagcaggagcagaagcaggagcaggagcaggagtgggagcaggagcaggagtgggagcaggagcaggagtgggagtgggagcaaccaccttctaccgagagggtggtttggccagtgagcttttgctttttcttattattaattgtttgcaattccagtagtctcatcacaacaattatctaccgacctcctctcacctacagatcactcgcctcctttacccacccaacatgtgcctcccacccctcccaaacctccgtcctgaagttctcctccatcacctcccaatccacaaccccctgctccctctcttccatcttcggttctttccagtcctcatcaaacacccactcctcccctccacatcccaccacggtattcctgtaccactcgtcttcttcaacacccaccaccttcacctctcccaaatcaatcccttcccccttgtccccctccctgaccaaaaccaccaccctctccccacccttgatcttcatccccgccaccacacctttcgtgtccccctcggccctaacctcgcaaaccactcccttctcatcctgactcacgaccctccaaaccttcacttcaaccctccccccgtttcccagcgtcacaccccccctcacccaccccaaccacttcgtcagcgtccccttaacctcccactccccacccccaggggtcttgacctcaatccccaaaacccactcactcaacacccacgtcggcccgctcgcccacccatgcgcgagagagttcctcgcccgggaagggtaagcaggatactgaacatccccatcaatcctgaacccctccgcaagcgtgctcccattattaaacccatccccattgaccagatggccccattccaacaacatcagctccaccgccgtgtccacctccccagagtggacatgccccagcagttcaaacccactggcaaaaggactgatggtgtttggaaactctggacacggcgccccatgttttagccacctccttctcaacttctgcgagatctgccgtctggtaggggggccgtgtggcaacggggagggtgctcgagagggtgatttgggtgaccggaagggcaaccccgagggagcgaggttcgcgcccgagatcaacaaccaggagttcccatcctgggggaggacggggctgtacggctgtcccttttcggggtagcagctcctctggccgatgttgtctgaaaacaggcccgtctcgggacagtacagcctgctgaggccggtctcaagccttgtctgggtggctgcccagagaggggggacgtcacgacctagccaactggccagggtggctgagcgggagaggacggtgtgcaggagcgccgaagcctcaaggttgtgccccgtcatccccggcctcaaccagtccgccgtgctcgtgacgtggacaagccccatgtcatccacaatcgagatggagtggtgcagcgcaaagaggtaccgtccccagatctcacccagccaccccagatcccccgaccacaaaacatacccaaacaccccaagcaaactgtgcagatgatacgtgtcgctgaactccctattctccgtaacccccatcggcggccccgcatacggcagtcgcccgtcgaaatactgatttttgaaaatcacccgaagcgcgttcttgacgctgacccaatcggaagtcgacaccgcaatggaaggtatggcaataaacatgtcccccggccaaaccatcctatccctcttcgccccatcagtggtgaccgactccccctccgagatggtgaaattgctgtaccacgacccggcaggcgagcggttgtggtcaacaacacggttgtagtcgatcagcgcgcccccttctctcgggtcgatgctgccgagctggagcgtgtacgcccccgcgtaccagatcttgttcagcaggtcacttgaagaagaaaagtaccccgtgtacgcctcccttccgttgtcgccctgagacggaaacgaggagcagctcacccggacctccgagatggcaatgcgtttcttcttcctccccaagcccgagatcctcccccccatccccaccccccaaaaccatccttggcccccatccccatccccgtccccatccttggggacatgcagagtaaaatacccaaacgcccccctcacaaactccttcccaacacaaacctcccccggtccctccacccccaaccgcagaggcaggtccctcatccgcctgtcagtcgtcgcgtccggcaccggtccggcaaagagatacgactccgagtacgccagactgacctcctccaaccccccctcgacactctcaacgacaagacagaccctcccagagatgttctccccaaactcccagctcacccaccccccctccccgatcctcaccgtcccctcctcaacgacaatatcaacatccccttcggtcttccatatccccctcggcacaatcctcctcttgtcctcgggcgcgcgtatatacctctcccaaggccccttccacccctttctcccttcaacctcacacagacacaacaaccaaacaagcacaaaaactctcatgttgagttgctgaacaaaacccgccgacaacaaatcaaccgtcgtcagacatgatctgatctacgtctcccccccgcactcagccgcagccagacattcaaacgcaaacggaatgataccccgccatccatccatccatccttacatcacattcctcacatttcattggcagatggtcaccacatcatacaacaatacaaatctagcatttcatttgtcccgaaacctacacaacacagagaaaaactagaactaataactagcccactcgagtcccgcaagcctcgcttcgtcaatgagaaacaacaaagaaaaagaaagaaaaaaagagaaaaagagatgcatcactattcctcctctcaggcacaaaatagctttctaccagatcaaccacatcacttgatgtgtgataatccttgctaccctagccaaaagaagcatgatacaccctcccccttttttcttccccttccaccctgctcattgacacaaaaagccagacatttccccaatcgctgcggtccatgcactagcaatggccgtccaaaagggctgggtatatccgttataaagcctcccagaccatgtgtgctcccaccccaggcccggtcctcctcctcctcctcctcctcctcctcctcctcctcctcctcctcctcctcttccacaacctcctcagcccccctgtcctcaccctccttcctttcttctccctaaactaattacctatccatctacctttcaaacccttttatttcttttcaccttctctcctcatactttcaaccacccccctccaatcatgcatcactgctagtcgtgctctccgtcgtctcgccggttgccgctgaaaacaaaattaagataacgcccgggtgaggtgttgtgtgtgtgtttgggtgggggatattgggtaatgtgttattggtggtgttgtgactgcggaatggtcggcgtcgagtggtaagtctgggagctatgggatcgaccagtcttctaggccgtgccaggaccttcctctgcaaggaccccaacccaagaaaccgtcttcgagcaagtgctgtcttgcagcgccaaggctctttacatatccatcgactcggtgccattggcgccgaagttaaagccgccctggccgccctgctgggcaccgttcgcaccgaagccaaactgctgaggctggcccatagactcatccgcgttctcttcctcgtccgagaagtacttctcgatgatgttgtacgccttcatgtaaatctcctcgttggcgttggtctggcagtcgtggatcttttccataccgccgcactcctcgataaacagagcaaatctgttgatcgactcgggtccgtcgccggcagcctgcttgtcaagatcaccgaccttgaggatgttctccaaaccatcgagggcgacctggatgattttgttatccgggcaggcgaggagatcgcagaggggcttgatgcagccttgttgaaccaagtagcggatctgctcgggcttctgcagaccacccgacgtggcgttgctgattgcccagcaggcctccttacgcgtcttgagatcgccgttggagagcagatgaatcaaaggaggaatgatgttggcgtcaataaccgactggatctgagccgagttgccggccgtgatgttggagatggtccagcaggcctccttgcgaatgccgtccttgttggagctcaacagagacaaaaggcagggcaaagcgccgcagttgatgatgacctgggtctgaacgtcgtcgccggtgactatgttgccgacggagcgaagtgctggggtctgaacagaggtcgaggcgtgcatgaggagctccacaagacggcgggggatgccagcctcaatgacggcttggatcttgtcattggcaccgtcggagagataagagatagcccagcacgcgtcgatcaagacctcgtcatccagagaatagaccagcttggcgagaactggaagggcgggggcaatctagagcaaaaagaacatcagcatcgtgcgacacgaagaacaagggacaacatacggtagcccagtcgggctggggagccttgccgcggcaaaagttgctcaaggtccaggtggcatttctgagcatggaaagcttgcggctgtcaccgagaagagcaaggagaggacggagggcaccctgggccaggacgaaatcacggcagctgggactatcaccggcaatgttgcccaaagcccacacggcctgctcgcggacatcgggttcgggactgcccaggagctcgacgaagatgggaacggcaccggcctcgataacaacctgggtctgcgcagcagagcccgaggcaatattggtaagagcccaggcggcctcgaactggacaagagtgtggggagagcggaggaactcgacgaagcggctcacaacgccagtcttgatgacctcttcgattggggggttgcgctccttgctgagcagtttgcggaacttggtggtggcctggatctgagcgtcaatctgttccgagaagacgccagccaccatctgagggaggtcctcgttgagctgcgcacattttccgtcagcattttgtctgcagcgaggtttgctgccgaatgcggccccagtcggtccagcagcaaccgcaacacgcagcggggtacaagtggggtggaaatgagaggatgatgctggagcgcaaaatcgacaccttggggtagggcagaggacgcgatgcagcgggaagcaacagcgcctcgcatggaataccgtcgtaaacatacctgagactcgctgggagggttctcatcgtcactgtcgggggcagcaccgagagacgccccaggacggtctgcaccagtgccaatgccacggcgcttggccaagttctcctcgcgcttcgccttgcggatctcaacctgctgctcctcacggcggcgacgaagctcctcgggcttgaatgtgttcttcgccttgaactgagttctgcgatgctcggggatgtaacgttcagacatgatgtcagtttcgccgatgggagatgggccgtggtgggtatggcaggcagtttgaggtgagccagtcgatagatagatagatagaacgatggaccagaccagacggcgggggatgtcgggtagacagtgaactttgatagagtcaggctttcgcaggcccaagtgatgatggtggaatgcacgatggggaaaagtttttcgttgggtgatgaaagaagttggagtgaagagactttgaaaataggtagggtcttgctctgggctttctctggcctggcgcccgccccgccccgcagcgcatggatcagttttggcctagttgtgccccaccctcccaccacacctttcgagtcagccagcgctgccttgtggctatggctgtggctgtggctgcctgaggccacaaccaaactacccctccatggccaaaatgggccaagacaaaaggagggcacgggccacagcacatgctcccgcgatgggttggtgagcaggtggaagtgctttgattagatagtgtagaccagacgcgccccgcggctttcaagacgcgttgagtgtatctcccccaccgttgtccatatttgacctaggagttcctttgctcagtacagtcaaccatgacttcccagcaggaagagggagatcttccccaagggtttgtccggttgagggatgtactggaccaaaagttcgtgcctggacaaatggtcaatgtcataggctccatcattgacacccaggccctgttcaaaaccagcaaaggtatgtttgccctgcttcctgtgcttcttcttccttttgcacccaggcttaccaacaacccaagattggaaaaccacatggtccctcatggattggtccgtggaagatgaatgctatggcgtcaagctcaacatcttccgacctcgtgaaaccgacattccccaaattgcctaccaggatgttgtcgtgcttcatagggtcaaggtccagagatatggcgggaacatgtccttcatcaccaatcatcagaccaccatcagggtatacgagtcctcaaagatccccaggcctccagaatccgcctctgtggctttgagaccgtgcaccaaaaaggacgaacgcccggaactgaccgaggaaatccaccactatgtcgcagccttttaccacaaactggacaagaccaacgccccctcagaggaggtgtttcggcaggcagcccggcaatctgccaacgtcaaggacaagttcagtctgctccaagatgtgcaggcagagaggttctacgacctgatcgtccgagttgtgcgagcaccacattttgactttgacaataaggcaacactctatgtgtcagactacaccgagaacccggccttccatgaccacattctcgagaacctcgatgcatctcaagacggcgatgtatatggttatacctcggaggagcccgcgccagtagcggagagatggatcgccccggaggggaaaaagtctcttcaggtcacctgctgggagcctcattcccgcgccctgcaggaggatgtcaagcttggctcctggatcggactcaagaatgtgcagataagacttggtcatgattacaagtatttggagggttttgtgcgggaagatcggacatatccaaacagaatcaacgtctaccctctcaacctggacgatcgcgagaacatggacgatcgcctcacagcagccttgcgccgtcagcaggctgcggacaaggagaagaagaaggtgatcaaggacatcaagtctgctcaggttgcaggtcagaagcggaaagcttcagaggtgcaggccatcgaggaccagccggctctgaacgcgaagcagcgtcgggcggagaacagagcgaagaaggaggaaaaagctcgccaaaacgtagtctctgccgcgcctgttgccctgagcacgaagagtgacccgccaaagcaaaatccgacccaagatgtcactcttgccggaaatcggcagataatctgcgagaaaagcaatgccggcctgacaaccatcgagagcatgctcgagccgagctttatgaaaatcaagatcgatgcagacactgtcgaggttcaagtcccattcgtgaacaagaaatacctgacctttgtccgcgttgtcgacttctcgccttcctgcatagaagactttgccgtcagccgcaagatcacccagtaccaagatctctcagacagcgaaaacagtgacggatcgtccctcgacgaggacgaatcttccggtggcgataacgaccccaccgtgaagcgtgcttgggagtggcggttctcactgttgcttgaagatgcactgccggcggatggatcatcgcctgcgcgggtgtgggtggcggtcaacaatggtgcaggtcagtgtctcaccaatttggatgcagacgacctccggaagaacaggaagtgccggtaccagctccaagatatcatgcacatattgtggggtaacttggaggaggtcaaggctgctaatggcgagaaacagcaggcttccaaacaggaggtcaattccaggccaggctctaggggtagcaatgggaaccgtacgcagatgcacgatctggatagtgacgaagagaaggaggaggttagtggtcgtggaaaagagagcagctcgaggtcgaatgagataaggctggtcagcaagcccttcacgtgccctatcaagcagtacggcgtcaggactgggaagaaggatgagtggatgcgtgtgtttgccatggatggggtgcggatcaaggatgtgtgactagtttttcggggaggaggtctatgtctatgcggttttcttttcttgtctcatgattaacgacatcctttttcgtttcagggggggggggatgaatcatctgcctttctactttggctgttctggcaaggcgttttgggacaagcaggcaggaagggaagcccaacatgtgagggagcatatgctgaggagaaggaggaacattaattagggcatatgacattgcatgttttaagcttatttaaatagctatcactttcagtctctgtacatgtggatatatatatatataagtcgtgtttcattttaagcgactggtgtcgattatcttcttgttttgttggtgttggcataggtttatatagttgcgatggttgtcagggactcgatcaggaaggaggatagaaagaatggggatgcaaagtcgttggttgaatacatagtcaaaaagagcaaaagcttaacattttatcttatcccgaaagtcagtaaatgatggtacaaagggaaataagagaatgaggaaatgaaaggaacgggcttctactgtaggtagcagccgtctcgataccatatcgacacgaactacagtcctcacgttgcaaagttggaatctccattgatacctatcaccagcaaaaatagacccaaggaatttgattgaaggagaacaagtcagtcagcccatacctacagcaccaagctgagcgactggatatacgaacagaaaaaacttccactactcctactccatgctttgataacatcaatgagcctgattataagcatgccataaaacaaccgccccccttttgttctgcgtacagcaagagaatgcagataaaaaaaatgaatcaataacaacaacaacaacaacaacaacgaaaaagcaaaaaaaaataaaaaatacataggtaatctaacgacttgagaagaagacaaaggcgcaattcccaaccgcccccccattcccagttgattcccttgcccagttccgtatcattatgtccgcccacaagcaaacaagtaactatctaccctttgcatctcaaaacctgttaccagaaccctattcaatcccctatcacactatcctcctccatcctctccccttccccttcctcccccccctcatcaataacctcctcctccgccaacccacgcctcctcaaatcctcctcccccccttcctccgcctcctcctcaatcggatcctcctccagttccaactccacctcggacaactcgctgtcatcctccccatcaaccacaatctcctcactcaacttcttccccccttgatgccccccaccactcccgctcccacccttattagcagcagcagcagcagcagccgccccccccttcctgacccccttcgcaaccttcctccccttattcgtatacctctccaccctctccctcaaccggccctcatccaaatacgccaccacctccttcaaattccccccaagcttactctgattcctcaacatcctcttcctcaaccgtcccccctgatcaagcatcttggccaggatacaaagcacatacttccccgccagctcgcaaagcgccctctccaacctcaactccttccccctcctctccacaggcgtcatatcctcctccccctccaccccctcgtcatccgacagctcctcctccaccggctcctcatcctccgccggctcgttcaacctccgcctcaaacacttcgcataggccctctccgccgcatcaaaaatctcaatcagctccgtgatcaagtcagccctgatcggctcaagcaagacatcaaggtcactgtacgatttcggagacgccgccccctgattgccctgctgcccaaccgccgttctcagcgtcgcaaagcagatatgcaggtcgcacaaccccccagtggaaaacaacctcagctcatcgttagtccccctcgacgacaacgtccagatcagattccgtgaatagtcctgcctgagcgagttaagcgtcagaatgtcatccctcgggatatcagcccgtgactgcacactcccaatcagcgccctcactttccacaaaaagtagaactgaacagacgacacggcagacgacacagcctcgtcctccaaatcatccagcgcctcgtcaacaacgtccagcttgccgcggtggacgatcttgatcaggagctcgatggcgggctggtcccccccctcaagaaactcggtcgggttcgctatcgacgccagtttcgacatcttgagcaggatattgcccaaccccgtgatcgtcgccggatccatgttgccccgcacggaaagctcattgttcttatcaaagtgccggagagcgttgatgacaatctcccacaggtcagcaatcttgctgtcggtgatctcctgcagctcgtcatgcttgcgagcatgcagcagcgcagccgtcgcctcggccaagacgccgcggtcgacgtggcggtcaaactgggtgcaaatctcgtccaacaaacgactgaacgtggtggagtcttgacgcagctgctggaaaatgtccagcggaagcgagtgctccagccgtagcaccatcacagctgtcttctcgtccgcaccaaacttgttcagcaggcggggaatgttggtcgccaggtgtatcgccgattcctccgccgtatcggccgcatccgtccgggctttcctcctatgtccgtcctccgtgttgggcgacagaccaagcttgacggccgaagcaagaatctcgagaatgatggcctcctcgttgccctcgggcgccacggctgccttgaaggcggcctcattagagttgctcctggacgccttggacctggactttgattttgtgctggtggtgtggtcgtgaaggagatagccggacaggatctcccagttcttcacctggtcaatcttctcgtacaagacctgcgaggcgagagatatcctcgtctccggcgcgacagcctggaccatcccgacggcaatgtcaagaccgcggggcggagcggtgctggcctcctcctccagctgggcgtcatatgcggcaagaagctcagcgagacacttgacgctgatccagtcccgacgaggagaggagtagtcgtcatcgtcttcctcgcccagaacctcatcaataacatcgctgccgcccatctcttccactttgccttcaatcgaatcgtcaacgcaaccggcaaagaagtcgatgaccgctctccggacacgcagctccgagtcgaaaatcaaccggccaatcgagtcaatctcgtctggctccaacatgccagtgtccttgagaatgtggatggcgtgaatagcagccacccggacgcctacatcggcgtccttgatggccatctcgaccagccgtggtctgaaccggtcaatgaagtgaccgagcttctcagcatcccgtttaaacagccgggtgacctgcttgagagactccagtcgtgtttgcggcatcgcgtcggtcaacatccaacccaggtaccgcaaatactctggcgtctcaaactgtgtgggcaggttccagatccagccaccaagagcctcgacacactcgcagcgaatcctggcgtcaacatcgcgataccgctggagaaacacagtgtcgaagaaatccaggatctgcgcctggcagatggactggttctcttcagcctccttcaggttcttctcaatcacagcaagacgctccctgttcttgcccttgcgcttcttctcggcatcaagctgctgcgtcatcttgctgacgcggtcatccagcttcttggcaatctcgaccaagccagcctccatagcaagggcaacggtggtggccgtgtgtctgaagggccgaagcgtggacgaagacatggaagccacccatctagcaatattttccatcaaggcagtgtctttgtagagcatgtcggtctcgtgcaggaccgtcagcagtgatttgaagaagccgaccaagagatcgcggaaagaccgggtcgttttggactttgcaaccaaggggtagtccgtgatgccctcctcggtgtagacgttctgcagatccgccagtctgttggagcagttttcgggatctcggatgtcgtcgggcgtgacctgctggtcacacccggccgacagcaaaatgcagtttaccagctccgtcacggcagccgcatcgtcggcttggtatttgtggtaccactctgtcgcaaccttgtccgaggagtcgcccgaagcaaaaatgtcggctgtaattccggtcagtttacatgtttcagcagcgcgacaaacagccgcccccaccacaattctgccgcacgcaccatataacccaacatcagtcggacgcgtgatggcgagccgaaccgccttctttggcctgctaggcagatggcctactatttggtcatgaccgggcgcgtcaccattggtctttggcttcttggtcgctggctttctcggtttcgccgacgacgaagaaggcgtcttctttttcttctttgcgcggcgtggttcttcggcggctgtctcggagccatcatcatcgtcgtcgctcgcattgttgttgtcctcttcatcgtcgggggcctcgttctcggcgtcatcattgtcccggtcgtcgtcgtcatcttcatcatcgttatccgagttgcgcttgcgcttgctggcgacgggcgcatcgggggtgaacttgttaggcgctttggagacgcgtcccgagcggcgcgccgaagaggtgggagctggagagcccgtcgtcgcgttgttgtctgatgtttccatgaggggctgtcgtccggataacatcacatttgtcgggttggtaaagagtataacagggctgtcccaaacacagaaactggctgcgatttgggggcaattgacgcgtcttcagaagctgggaaaggtcggtgccggtgcgatcacccagattattttgggcggattgaaccgcttccccccaccaacacggctctgtgcactgaccacctccagctgcaatcagcagccatatgcacctaccgggggcctattgttgagacatcaaccatgcatgcagctggctgcttgtgacgcaaagcattcatttcacattcagttgctgaatatgtattctctctcggcattcatcatgaaagtctgcaagggtaatgaaggtctacaagggtatcatcgtacacacataagggcatggtctccaaagtggtgcgagatgcttccctcttcctgcagcatggatccaatccacagccgtccgtcttccacctcaggggctccgaacttgaccaccacacaaccccgtacgttggcggccgaccacaacagcttgctgttattttccatcacgagtctctcggccctccatttttctcgcggagttgcctgagctaacgctgctgcctgcttagcagcatcgcttcggaaatcacgagccccaagtctcgggagagcagcgaactcggccaggaagaagtctcccagcgacttcatcagcggccccctgagcagcagtgtccccacgatacccacgccgtgcatcgagtctcggagcttggccagttccgggtgagacctgttgctgtccaggatcacggcatctctgacaagcaacctttctctcgaatccgtctttccgtcttcctgagcagcagggataacccatatctcattgcgcccaacccatcgcacaaaactccagttctctcctcgcgcagtgcgaccccgcgtgacccagtcgagaagacatatcgaggcgtcctcctcaagccgaaatatctgtgtttgctcatacacactccctgcgaatggctgcaccggatcgggcaagaggcagagtgcgccttcggacgcaatgtggacatgcatgtcctgtcgcgtgacgatgtcgggggaggtggacgtgaacaccttggtgtggccttgtgtgacgatggtcagcttggccttggctcgcacgtcgaccttaagattgaccttgtcgccagccaccagtccgccgccgtaggagagtaggaagaccagcacgctctcatcttcggacggtcgtgaaggtgagatgagtttgagagggtactggtaggtgaaggtctcgaggccggagatgccctcgggtaggagctttgcgacgaggtggccctgccccggaacggacgtagatttgggaaatggtgagttcattttgttgtcaccccattgtcatgatgatgaatggtcaagatctctctttcttccttgatcggagctgaccgtatcgtatctgtctcatgtagtgtagggtggatggggtgccaagaggagggttggccatgagccactctcagatgacccttatctgtttatcgccgcccaggaacggcccctgccccgcgctcagacaggggagcctgtatcgtcccccaccttggcgtgcttgcgatgcagccgtccccggtcaaaaaagtttggtggggaaagtcagaattcagaacctatgccatccatgcttcccttccccatcttcacacttgcaacctgcgaaaaaccaacgcacccgattcaactgacagctgctcattgtcttgtcaactcgcacctaccacaccgagtaccagcaaccactccagaccgttcttctcagtacgcgtgacttccggcagccatgccccccaaaaccgccctcagagggcgtggtcgaggcagaggaggtaccgcccgcggcggctctgcctctgccccggtcgccggcgatggttccgccgagccggctactgctgtggtcaaatccgagacagacacaccagcgtcagcttcgacgtccacatcagcccccccccggggccggtcagcaactgcgacacccgctggtaccagagtacctccaaagttcaaaccaaagaatgtccgtcgtagctcagcagatcgtgagagacttgcccgcgaactcggccaaatcagcaaggctaaggacgaggccgaggagaagcgaaaggctcgcttagccaaggccaacgtacgaggccgtggccgtggtggcggtttccgtggtggcgctcgaggcacagttgcactcggtcctcttgctggtggaggagcatgtgagttttgctttttgttctggcatctcaactagtcgtgcacatttgctgataccttggtagtcggcggcggcggctcctcaggtggtggtcgctttggtagggctgattacatcaagaccgaggccggcggtctcttcggcagtgacggcagagtcaacgcggatctattgcacgactacgtccaagattacgatgacgacaacaaagaccggccccttatgcctatgggtatccgacgtgtgcagccaaagtctcaggaggacagcaccgaggacaatgcaggcgaagaggaggattccgatgaggagggcctctttgtgaatgacaaggagcgggctgcgaaggataggcttgctgccaaacaagccgccaaggtaaagactgagggcggtggccaggatgttgatatggacagcattccccctcgctatggggaagccgacacagccggctacgaagatatgttgttggtggatacgagccagaagctccaaatcagcagcggaaaagctgaggaactgcggagacagcgccgcctcttttcggaaccgttggacgaccgcgcgtttatctttcagttccccgtcagaccaccgctttacgtcgtcaaagatgacggctcgctcgccaagactgagggcgacgacgaggtggtcacgctggacggtcagcaacagggcaatgcttccgtcgatctgactaccggggttaaggaggaggaggtagcagaggaggagagcaaggaggaagaggaaaagccagtggtgccgcaggcgggatatctgggcaagctcatcgtgcgaaagtcgggaaaggttgagattgactggggtggctatcccatggactcgggcactggtgttgcgcccagacatttgtcgaccgctgttttgcttgagatggaggatgccaaaccgggcgagccgcccagagggtttgcctattcgatgggccgtgtcgaagcggtcttttcttctgttcttaggaccagtgatatggagccgtgggtggtggatgggcaggttcccggtgctgctgggagcgcttgattagatggaaaggcagatgggaataaaagtattgataccctgtagagatttagtcgtccactgtgttgaaatagagaggacttttccgtgcaagtcgcgattttcttttgactttggtatctatgtttttacttcgcttgacagctctgttctagttactcaataagggctctcctggtaggccctttccgcctcttcgtaagcatcatacccatacaagaaggcctgaatctcggggtctgtccatctggatgggaaacctgggcggacatcgtcgtcgtttagctggctggtcatgagctcgtctctggcttgctgggccgggccgtcggggaggtgcgagtcgtttctttggttgaaggtttcgagctggatgcgccggccgcgttccatgcggaggtgttcgtagagcctgcccatcttggggagctgggaggaagatgttgattttcggaccttggagaggaggtgcccgaagacggcgccgtcctcgagggaggagttggcgccttgggctaggtaggggagcatggggtggcagcagtcgcccgccaggaagaaggtcccttgggggttggtccagttggggagggggtcgagccacatcagcttccacttttggacggactggatctgggagatgagtttctggaggagggggtcccagccggagaacttggatctgaattcccggagggaggcgtcggatctggcgacgtgggagggcatgtcgtctgggcagaggaagacgaggttgtaggtctgggaggaggagaccgagtaccccacgcagtggctgtggggggccgatccagaagtgcactgtggggtttgtgatgagttttcggaggaggtcggcgtcgggaccggtccaggtgggaggcgtggagggtgatgcggtaggctagatcgcctgtcaggattgctggggagggttggcctagaaagaatggtcgaattgacgaccagaggccgtcggtcaggaggatcacatcccctgagagcgtgttcctggccgggttctggactagcccgagatggactgtgttcgtctcgaaatcaaccgacgtgaccctggagttaagcctgatggtgataccgagctctgagcacttcttcaccatctccctctgcagatcaacccgatgtaaatcccaaaaagggaatcccataccgttccagcatccgctcttggaggtttggttcgtgggcgaggagcttcgtcccgtcgtagcggtggacggagagggaggtgggcactgcggcgaggggggcgcggatggggccccggccccagtgggacaggacgcgggccccgtttggggtcacttggaggccccccccccccccccccccccaggttagcagacgagatggaataggggtcaatagaggggcacccacgtacgccgacttcttggagctctttgacggcttcgaggatggttacttggtggttcgggttggcgagcttggtggagagggctgctgctagacctgctaggccggcgccgatgatgacgacgtggatgccttcatcttgagtttttgtttcagtagttgtgtctggtataggcacctcctttggcccgtcacttgatgggaggaccattgtgagtgtggtgtgtgaaagatgggacaggtgagggtgagatagcaggatgatgatatgtggcttcaccccctctcaacagttatcactgaaacaaaacatcacatctcacattaaacgccaacagcgtggcgttttagtatatcacatttgagacacatgtcctggccgtcgccggtcgagtgtaaccggaactaagtgggggcggcagtacaccagcacccgtaaggcggggaataacctggggtaaatcaacgggtaagaagacgcggggcgacggatccggacccaagggaacaaacaggtcgacgtcgtcggttcggcagctggtcggaaaatagcctccctcacaccagtacggcagacgatatcggcccacgacatctgcatgccgagggtgtggtcaatggggcattccaactaaacattatgctgctgacagcttctctcctcccaatatgccgtctcagggaagaagttgcttcctgacatgtctctccatatgccctcaaatcttaacagccagcttaaaccccgtcacagctatcctcgcggacatgatcgtgaacgaagccaacaccaccaccgtcccagcccaaacacaagcccatgtatatgtcccatttgacctgtcgatgatagcaccagcagttggtggtccagccagcgaagaaaacgcgcaaagagtgcagaccatgccgaaccgcgttcccatctttcttggatccttcaagagactggcaagcgcaccaccaaacacaccctgggccgctcccatcgcgaaaccaagaaagatggcaaacacataaagccccgtagcagagtccaccgccagccaaaagaaaaacatacaccccagcagaaacatctggaaggcatgcatgttgatcggaccaatatagttatcagccaaataccccgtgataggcctcgcgacaacactcatcccgttcgtgatgagcaacaactgcaccgagtccgtcgtcgagaacccaacaatgttcctcgcaaacgcattaatctgttcccacattagccatctatcatttcgttccatcctcagactactcacaaagaagctcccgaaaaacaacgcccaaaaaaacaaaaacgcccccagcgtaaacaacaaatacggcccctccctgaaagcatcccactcaaacaccggcccgctcctcctcggcttcaacaccggcctcagcaacaccacactcacaaccgaaatccccaacgccacaaaccccgcgcacctcaccgcccaggcaaacccaacctttggaatcaaatactgaatcaccgccggaaaaaccacactccccaaccccgtcccggtagccgaaatcgccagcgccaacgcctttttcctcttgaagtaactgttcaccaccgacagcggcggcatgaaaataatccccaaccccaaccccgtgcacaacccctgagccaggaaaatctgccagtactctttacataaactcgtcataaaggtcccaaagacgacgaggaacgtcccggcgatgatggtcgacttgatgtaccccgcgtcggcgaggcggccggagaagatgcagagggcaaaggcgaggaagacttggagggagccgatccaggagacttgggcttcggggaggcggagggtgtcgcggtagtggagctggtagacgccaaaggcggttgggtagccccaggcgagcatgttgattaggcaggcggcgaggacttgggaccaggcggttagaccgccgtcgggggggatgaattcttcttcttcttcttcttcttcttcttcttcgtctggtgttgttgttggggagtcgaggtcggagctgtctgataggtctgcatcttgggctgttgtgagtttcgtttctttggtgttgggatgtgatgatgatggtgctgctggtggtggcggtgatggggccgaggcgaccttttcgatgtcgacgttcatgatgagtgttatttgcttggctcaccctgtgtaggttgtaaaagttgaatcagcaaaaaacaatgacgacaagaaaggggtagtagtagtagtagtagtagtagtagtagtagtagtagtttagccgttgatatattccatcggcgataggaaaccaccaatgactttttaactccgccgtccaaagttttctagaaaaaaaaaagccagtcgtgggtgggaaaagtgtgggtttatcgtacacatccttgccgggtagactaccctggttttggtaggtcgaacgtcgtttattcccggccatatcgagaactgtcactatcatcaaacaagcgggcgagtgtcaagatgtcatcttgcagattctttacgcccttgattttgacatcttctccgacagttgtccccgcaaatggcgggaaacacccggtcgggaataacaagcaatatcgacatgccgctgctggctgggtaggtggctgaaatatgacatatcaagcacactgtgcaggcgacaatcaaaagacggcctatcccgggccgtcaaggacgggatgggtgtctgtcgggtagggagcgccggctgccgaggctctcatccgatatgcacaactcccgctcccgataacggctgtggaactcttgctgtcgccgactggccgggagagacgggagggtgccgaagtgaggcggcctttttcggtcctgatttgggagacggtgatattgttcatgtttggacaagacaaagcagccatcacgacttcttcagcaatgggaacacaagcttgaagtgggatctccaaatcgtaattgccgttaagcatctcaactcccaatctcgtcaattgccccaccaagataaggtcgccttccatcggctttgtcgcccccatcgtcaatatgaacacagaacagacaatcgcgatcttcgctgctgtcaacctcgtcataactttcccagtcctcaagtcgcacataaaactgtctcagtgccacgaggctttccagtcgtgcgaccaaaacatcatcaagaaaccaaaacaattctttcagaacccaaccaatcgcttaaatttcagcagcgcagaaacgtcaaagtgtcagatgactcaaccaccgcgtcgcgcgcgctattaggaggagaacgggaaggttttagtcacaggggggtgcatcgagtggcagaccgccattcatggcccggtgacagcccaagcaaacgtgaatatccgcatcgcatttagcttcgattctcagtcaacataagctattgaactcatttccacatccaaagtccgttgaacactgaatatgtacatgttggcaccttcaagatggttcatccaaaagataaattccccaagtgtaaagatcttcaacccttccccaagccaagaccaagtggcaacaaaccccaacaacaaaccgcccaaagccggtccaaaaaacccatgtcaacaccctctcaaccaatcagcgcccccatctcagccaaactctcgacagaaagggaaggaacccccaaatgtggggcaactttagaaccacgccattggatctgattgatcttccccgcttccagcacaaagccactcaacccaaacttgcttgcgcacattaacaatgtatgagatacaaggaatccttccagacatattgcgccctacaataactaaagtcatcaatcaagagataagctgcgacgctgattgacaaagacatgcgccagcttacaaaccgcctagcgcccgtttgaaaaagcctcgctaatccaaccccgatcaggcttaaactctaaatcctatgcgccggaccaatcaaatctcaccacttacacgggaagtttcctttttttttttttttttttttttttttttgttgcgcaacagaaaaatcgcgagggttgccagatggtgatgacaacacactctttcatgatagctgtatgaaacagaacaaaaaacatagctcgcatttgttgggcgacagtgatcccattacaaaaaggttttagaatttgtaataggtagaaaccacgctcactgcttaacccacaccaaatccaatatcttggtaactttttactccatacgttcatgaccatagcaccaaacagacaggtggtattcgcggcgcataataacacaccattaacaccattaacaccatcaacaccatcaacaccatcaacaccatcaacaccatcagaaccccatacaacaaaaacatcaacacagaacgaagcctcaaacagtaagaaattcggaagaaagaagaaaagagaaaagaaaattctggctcacgcttccccggagcttcagtccaggccgcaatgtacaacattcagaaaaaggacaccgagaaaacatcataaaccacacaccaacgcaacaaaaacagaatatttccagtaggtacctcgctataaaccacccccccccccaacaacaaaaaatcaaacgctaaaaagacatgagtgatgatgtgatgtgatgtgatatgatgtgcaataaccctccctccctcccctccattccttccaaatataccagagttgaaaagaaagaaagaaaaaaaaaaggaaaatagaaaaaagaaaaaagaaaaagccataatatacactcctcccccacaccccttcaaatcaattaaaccttgtaaaagacagaatcaatcccccgccccccccccaatcccccttttaacccctgagccatccattcgcccttcctcttttccagctttcgaaccatccaccacccattcctacctattttatccattcccacccactcactcaacccaaacccaaacccaaaacccaaacccaaacccaaacccaaacccaaacccacctccccacctcccaccaacataaaaaagaaacgcagccgcttttagaaaaaaaacaaatgaatctctttgattgatagagcggaaaatgttcaaggcccgacaagacaataacaacacccaaagacggtaatgagatgaaggttaaggggtggccctagatagtcatcctccccaatagcggacatgcttaataaaaagaaaaaaagaggttgtagccatcaacataggaaaagacaccaaccccgtgagtctccaacgagaactccacaagaccattgacaaggtatagcagaccacaccatcccgaccccatctcacaacaccccactgaccatcatcccatcatacaagcctttcaatccggggttgacccatcaacagaaaactcatctcttcctcttcttccccttatccccccctccaacctccgaggcgtactccgccccgccagtcacccccccgccgaacccaccccccatcatcggcggcaacgtcgtcatcgcaaccggcgcagcagcaacctcctccttgacgagcggcacccccatgtgcctcccatacctccccttcctcccattcccctcatcctcgctgatgcactgatccgcccccagccccgcatccttgcaccgaccgcaaggcctctgcctgtcgcaccccttcttgctcttgcgacacctctggcagcgaggcttggtcgacaagtcggggtgctcgtcatccccggcagcaagagaaagcccggtgttggacgcgacagactgcttgcgtgaagccgggagcgaggccggggacatgggacccaaagcggcggcggtaccgccgttgacggctgccgtcttcacggccgcgggctccttcttgaccttgggcttctgaggccgaggcttggactgcgcagcagcagccgcggcagccgcggcagccttggcttggtgaagcgtgttcgccttgagcttggttctcggcttgggagccgccatggcgggcttgggggcgctgtccgagcagtaaccatcttcaccgctcgtgtcggcgccgtcggcggggccgacaaagtggctctctgtggtatggaggaccttcttgtggtgaccggcagcgtcgagcttctgtctccgcgccgccggcacgtcgtgatcgctgtccgcctcgctggtggcacccgtcgacgaggtggcgtccgctctgccgctaaaggtgtcgtccatggtggacgccgacgtccggccatgcgtggagatctcacccaggcgcataagctggatggcgacgtccttgtcttcctcagacatgcagctgttggcggtgccgtctggtgtcgccaccatgggcatccccggcgtggccgcgaagccgaagctgccgcgcgagcgccgcatgtcactgctgggcgtggggtacgtggaagggtgcgcaaacccgttgttgtaactgtgtggggagtgcaaagaaggccgaggattgctgaagggatttggcccagactgaatatatggcagcgagggacgatgctgatgatcagcacgccgcgccggtgagacggaagggttggacgtggccgcgggcatctgcagaggggcatagagaggcaactcctggagacaaataaaactcatgtcagaaaccagcattcacaacccgttagacgacgtcttcaacataccgagctgtcaaacttgggacgcttgcgacggccaccctcgacgatattgtccacactgatttccgtgttgccgagatggtccttgcttttgctcgacgacgagcctggcgcgccgtcgccgctgctgtagccgttgaagctttcaccgtgactgtcgccattcaactgcgatctgttcttgacagaacgtgaccgtaccttcttggagccggggttgttgtttgccgagccgctgcgacgtccacgtccgccattaggcgaagggctacgcaggcgtgacgcaggcggcgagtgaggtctggcaaagagatggtcatctgggcgcggaggtggtggcagaggcgactgggacatgaaggtttcggcggtataaaagttgtgttggggcgctggcgggtggtcataggaatacggccggggaagctcgtcgtgaacccgcacggaaacggtcatatcatgaacaaagttctcgtagtggggaatgaggatgttgccctccgcatcctcaaagcttacgcctttggagatagtctgggtggtatacagaccgtaaaagttcttgaccgtcgacacgatcgactctgtggcgtcgtgagggtagatcttgacacgaaggggcaggcgcccccgcgatgcctggaagatcaagacgaacgtaacctgcttgggctccgcgacggtacggggcgagatgctgccgttaggctgacctgggcgcccctgtcctatcccggttggcgacatggctgccattgtatgatatgtatatgtgtatctagtgtatcgcaccgtcgacggtggcttcgtaaaggaggtcgtgtgatggaatgtgtgtcgccggtggggctcagcaccgttggttttgttcggtcgataaaggactcaacaatcgcattggcagtggacaagcgctcgaaaaaggcgacgagggtacaatgccaacggacgggtccggcttgaggggcggatggacagtggtctatccttgattgaggtcaccgccagtgccgcaaggaccaagccgactcttgtgggtgctgctggggtggtgccggacggtgttgggaagttgttggatctggacagagcaatgcgacggttagagctgggtgcagatggacagcagcaggtagaagaggcaatgccatgaagggctgatcgaacacaggaaatgcggtggggaaccaggggtgtaggaatgctcgatgggtaggaggtaatgatggtcggggtgcgagcgcaacacagcaaaagcgggtgctcgtcgggggcaaggcaagcaagcttgcttgaaagcagatagaaggtatacagagcaaggtgttggggtcgcaagggacggaagggagcgaggaggcttacggcaaggttggggaagcggtggtgtcgtggaggaactgagctgcgatttcttgtcgtctctctctctctctctctctttctctctctctctctctctctcgttgttgaagatgcgggcccgacctagtcaagtcggcagagtgtgagcaaggtgggagcagaagaagaatcgggctagccggaagccggcgatgggtgacgggcgatgggatggggtgccgggagggggacaatggcttaccagaggaacttggttggtttgatggcaccgggttgagcaattcggaggttgtgggcgaggaagagaacggaggagtcgcaaagaatctgcattaaaagagcagatgccggtaatcgcacacccgcacaccaaactgcctgacctttgcgcggatccgttcagggcagtcctcgacactgtgccaccgcgacacaatggagagagcagcagaacagcagaacagcagcagaacagcagaacagcagaacaaactggactggaacagatggaacaggctggactggcttaaggtattgtgaatggattcttgatatctgtgatttgggcaatttccggccttgcgctccccccccgatcgcatcctcatctagctcttgcgccagggtgcgaggagctgccaactgggcgcttttcgcacggccagccatccacccagccagcggagcgcttgcagacgtggtaatccacactgaccgcacctaaccttacctcacctctggcaagcttcccggtcactgatcaccagatggcttttgccaacctggcctgggtcactcacactccccctgccagtgcatctattttcaggaagcttctcttctgatgatgggagaaaccaaagactgcaagagacagaaggcagagcagagaacagcagtggctgctgctgctttgctttgttgtttcgggtctcttgtatcatgcacagcgcattcggggcgcattccgctttgcgccgagatctgagaaatgtgcgatattctttcagggcaggcacattccgattcaagacttggctgtcatctctctctgtgccaggtcctgttttcttaggtattattccttcttatcactcttcccaggagtagagtcccaaaacatgcgatggcgcagtctcccgaagtagcaagcagcagcaggagcagtcaaggcaaaggcccgctgcattggaggtgaggttgtgcgtgtcgagaagtgtctgcacgaataccagtttctgagagatcatttaattcgccttccggtcgatcgagacgatacatagaccgctctcttttcttcttctgcgcgcggctaaaatccgtcaagtgttttccagacacccaagacagacgctgtttacagtcgctgtttacagtcgcgaagaagaagaagaagcttgatgcttgccttgcaaggcgcatataccgacatgcagtctacgaaacacgggctgctcaccggggaagccctccttctcctgggcctcaccaatcatgaccatgggggaagccgttgttggtctgaccatttaggaccgcctggtattcttgggcacacaacacaagagctcaaatgtagggtcaacgccctgggtcccctctggccagtggccaagtcgagcccacaggatgagaatgcgccagagaggttcatgaaccccccaaggtgcccgttgcagccatctcgaacccctccatcggccaatggcagtcgccagcaaggtagcgcagcaacaggggtctgctgtagatgtgcctggcactgataggcaggactgcccaagcccagctgtcgtggacaagaaaataaacactgccactcgatagataagtattatcttgtccacaaggtggccagcaaggtggcgccgtggccctacctgcagcagagcagttgcattttcagataaaatctccgctgatgggcagagattccagagatgtatggtcagattccacgggagacacaacggcgcaagccgtccagatatcagactgggctcaccgcaaatgcgcggggtattgatggaaagattgtgagattgtgagagatcgcaaaagataaggaacgccgggcaaacggggagcttccggcattgaccgaagcagcatgcagaggcgcacaactgatatggatagcaaaaagtctgaaatgaactgtttgcctgccccgcggctggctccccctcagtggcattaaggttgtcttgggccgagtgtattcgaggcaagccggccgtttgttccctctttttggcaattgttgtgaggtaactttgtgtgcgctgcgcgagcgcgggtgtgccgtccttggtttgtagaggggaggatcgggcgcggctcgatgcgctggcaaagtttcaaatgcagagcctgcatcgaatcatcgcgccagattctccgagttctcccaagtgtcagaccgtcaacaaaaggacccgcagacccgcctattacctgtcactgctctattattcgtgattcttggtccttggggacggccgtggtcacctcgaagctcgctgttgcagaaaacgctaacaaggtggtggtgatatctccaagtcaagatgctagtgtacccctctacgctcgccatccatcacaactaccgcatgcagctcaggcccggacgagcgcacttgcgtccatggcacttcccaccccgctccacctttgacggaggagacggacagctggaggcgagcgaggaagcgaggagaggaagcaattctctctgggcagtaggggggaggggtcttggttggtggcgggtcgtacatgcacgtacataacatagagctttggctggactcctggacatttgctggaggtgagtgactgtcagcgccagtggcttccattccgtggatcttggctgcttccatgaccgcaacggcacccttgcccgtttccagcgcccgatctgcaaccgccagacgccctcgattcccctcctctttgcttgatgtcccggctttgtcgcaagagtctctggcgggctttccggacaggatccagccattggtgtcaccaggtaccacggcgcattgtttttggaaggttgcgaccactccatccgtcatgtttgtcgcaaccaaactcacaaagagacaaaagagtccgtccacgatcctgtggggcacacacaactaagaagctccggccccacaccattggctcgtggcttcgttgttccccagatctgaccaaacacttgacactccggaggagaatacacagtagctcagagcaggtaggcatggtggcatgccctcgcaacgaggagggggacggtccctgttttcgccacgcccacaaaaaccttgacgtgtgtgccaatgtcgcagaaagggcacacgttgctgattgcgctacataaatcgaagctgcgcaagagatcgcatcatattaagcagcctactccgcagcggagcgagtcgcggaagaagccaccagcaaaacccacccctgctatcgaccgaccgtcgcttcgcggcagggcacatccgttccgttggcaaagtcaaagtttcaattgctcaggtgggcgccgtctctttgtgaggaggtagcgtaggattccaccacatggcacatgcgatcgaagctcaagttggagggagtggaggggttcttctcctcttgtcacattctgcaagaggggtcgaggaccgtcgaggcaatttatggtcccggagcagggtttctcggtgtcgcctatggactgtccaaacctcgcgttgaccggagtctctggaaaacgaagagaaaagtagagttaatacccggttctccagaagctctggtaacttctcgtgttgatacacaaggcgtgcttcagccattgctgcgccgggttagatggctggtagtgcttaggtaggtatcggcggccgttggtcaagtggcccgacttctccacccaccgccgccgcgctgaaagttttcctttggatggggatcctggcccatggctggttccggaatggcctcgtcaggctgcgatttatcctcttgagaatctgggagaagagaaagatcgaaattggcgactgacaataggaaagtcgtgattgaatagaacctcaaagtccagcaaggttctcacgtgacaacgcgaacgggggcgggccccggtctgccccgctacgcgtaaaagctggtggcagggaaaatgaaaaagacgcagctgtggaccaataggagtgcgataaagaggaaacaatggtaggtgccagctctgggtagagattagggttgatataagtcgagaatggtttgtgagaaataatgtggtgggatttgctgtagcttgcttaattaaggtcctggagaagttgacgcgccggtcgcgaaaaaggccagtgcccagacggcgggggctacgtcaccccatggaagagttatgtaagctttgagcatgcttgttgattactggtgcgagacaacacatgcatcgttagtctgctggatttgggcttgcagactccacgatggagatcagaactccatagttgacctacccggccgggctgagatggagaatggcaaggctgtaagtgatgatgatgatggccatgttcttcaaatgtgaaatttcaaagggcatttgatgctgttttgttcctatcccaggaattggaacatgtgcatatgattggggtcgccgtaacaacccagacgggcatgcacggaccacaccgcccaaatggaactctgtctgtgtttacttgcatcttgtcaataaacacatggtgaaaaacattctcgctgtctctttaacctttgctccacccgcgacctctgctgttggaaggttcttgtcggcatcgcacagcaatcgttgcttcaggttcctcttactcatgtccttgacctcgatacagtgagtgaaggcgcgccccgcttgacgcttgaccgtgtcgaatttattgaggtgccttcccgacacccacgcgccctccttcccgctgcgctggtatttttgcgacgccgtggcaaccagcgcccacgatagcctcaccagccccccgccttgctctcctcgttgctccgctttatatctcgatgccctcaagcctattcgccggcttcccagtattgtcaacaggaagaatccatcccgagggacgacgataaagtattcagtttcgattcaggagcggggaccaccttttctctgccctctgctctctgctctcctcgcaacaacaaccacatcgccttcttccaccactacctcacttttccagagaccaaagacttcttctctgactcgacaactgccatctcaaccgctcgtctcatcgttcccgcaaccaagacgatatccagaaggaaaaaggtctttgcgacaacagcctcaaccaacatcaaatagaaggtaaaaatccgacatcatggatgccaaggtatgtctttttgcccagaactcctccccacttcctccctctacccaattctgccatcccatcatcgttggtcgcaagtccacgagcgcccaccttgcccctccacttttgacttgctcaggtggaaagcctcgtggtctattcaccgtctgaagtcgctcgagacgagcttctacataacccagaccgttctgccgaatcttccatgacagacaggctaaccaacttctcttcccgaaatagcctcagcgccctctgcgcatctaccaagccgcccctcctatcaccgagcacatccattctaacaagccctccttgcaccagcgaaacaagtccgttggcaccgtcaagattatggccaacacgggtgccctcaacgctcctcccaagagagtcatcctccacgatttgagcaacaccaatcgccccttggccgacgagcccatcggtaaggctgttcgcgctcgcgccaagtcggttgttaatgctgccgctcctactgtcgccggagccggtcgcaacgacgagaaggagaaccaccaggttgcgcctgctccggttgcaaagtcctacaacgtggctccggtcgatgtcacaaagcccaccgctcgtaacgccaacagcctcaaccagcaacgtcccgtcggcgcccttgcccaacctcctctgaagaatggtgttcccaggaacatcaagcccaccatgatctacagagacagcaatgagcaggaagttgccggtcgtgtcgagcttcttaccaacgttgacgatctggttgccatggttgacaagcagattaagcgcccgcgtcaatacaagagccagccatccttgaaggcagagcaggcctcccagaagccgacccagtccaaggctgcggtccagaccgagaagctcgccgagctcgatgacgagagcgatttcgacgacaatgttaccgaggcggcttacgaggacgccgtggagcagatttcgtacgacaccgccggcattggcaaccgcaatctggttgagctcgagtccgatgtgtccgtttccatcacgcaggtggccaagtcccttcccacagctgaggaggacgagtattcggacgaggatcactcgggtgtttacgaggatcatggatacacgacagcccactcctatcggtctcatggggacaacaccacgggcggactgaccaccatggtagctcctgcttccagcctcaatgcgcagagagagcttgccattgccaaggactgggttctttctactcagacggaggaagagattgaggaagaggcctgggacgtgagcatggtggccgagtatggcgaagagatctttgcttacatgagacagctcgaggtatgtactttttgcagtggagcgcgtcaggagccacggaactaacagttttgttttgtgcagaattccatggtccccaatccccactacatggataaccagaccgaaatccagtggtcgatgcgcgcagttcttatggactggttgattcaggtacatcaccggttttgcctgctccccgagacgctgtttctcaccgtcaactacattgaccgcttcctatcggtcaagattgtctcgctcggcaagctccaacttgtcggcgccacggccctcttcgttgccgccaagtacgaggagatcaactgcccatcagtccaggaaattgtgtacatggtcgactcgggctacaacgtggacgagatcctcaaggcggagcgcttcatgcttagtatgcttcagtttgagctcggctggcccggtcccatgagctttctgcgtcgcattagcaaggctgatgattacgagttggagactcgcactctggccaagtatttcttggaggtcaccatcatggacgagcgctttgttggcagccctgccagctacattgccgccggtgcccactgcatctctcgcatgttccttgagaagggcgattgggtatgtagttcttgtcttgcgtcttgtggcatctcggatactaaccgttctccagactctttctcacgttcactactctggctacaccttgagccagctcaagccactcatcaacatgatgtttgaatgctgccgcgagcctcgcaagcaccacagcgccgtctatgataaatactcgtcccccaagtacaagaacgcctcgacctatgttgaggccaagatgcttcgtggggttacgctgtcctacctctacagcgccatggccgaggccgcgagctcgtcgggctccgagtgtgaggccttccgcgccaaccaccacttgcctgttgcccttgaggcctaagtctcggacctcgcttccgcccagaaaccatgttgacaggctcttcacttcgatgtacttgttcattgcgacaacctcaagcatgcatttgctggaaaccgtcgcagcaccacagcatggatctcatttcttgatcttgccacgttggtgcttcacctttttgttttctgggccagcaagcgtcttttggcatttgccctcgacacaaacagacaccaaaaggttgtggcagagattttttggtcttgctatcggccaccaccaaataatttctttgttttcttcgttttcttttcttccgcttttattctcgcatcggaggttttttcttcttctttccaggcactcgtcgcaacgtctcgctatttcaatgcaacccatcatgcattagatttttgcggaacactgcgtcttggctaatgggacagacttccaggattcgatgcacacaatgtttttttccacgacaaccaccaaaaagtcgacagaaacatattcgcccttctgacgatgtgacgaatgccctctcacgataccttgtcttttttgcccatttctttgcgcaaaaatttcccttgttctcatgtcaatacggttttcttctcctttgtcacgattgcgaagcaatgaaggtttgagggttggttggtgatcctgagcaaagcattcatggctgtcatttacatggcgttgtttgggtggtacaaaggcattcgggaattgggaggttagggggaacattctggtggtgggagggtggtggtggtttatatggaaatgatatccccgtggcttattgatgacaccctgaagagaggtggtcaacaaagctgcaagcaagcaaggcgtcttttttttcttctcggttctctttctgggaaatggaatggggggttatctgggattgtgggggaggggggggctggtgttttatgggtggttgggaaattgtgtgtttttatgtctgctgcctttttttttctttcttttttcttttccaaccaggatcattggagggacaatgctgtttgtttctcttttagaaaggaggggttgggggggaaaggaaggtgtttggggctggcgggctactattatgtgtataaattataatattttctgggggcatgatggctattttcttttgatattttttcttctctctgttatggagggagggatagatattaggggtgggcatcacattatgggactaagttcgattgaggggtttagatgccaatagatgtgacacggtgttgtcttattgatttggggatgggagtgatgtgagtgaggtgagtgaggtgagtgatgtgaatgatgtgaatgatgctcactcttgtgactgtttgatgaccatctcaactgtcattttctctgcagtatcatatggtacctgatatacactcccttacacttgaattgttattatgaagagcaagttcaatgtgagagacccctcgctgtgttcaaaacaagatagtacagccagatcaccttctacacaagaaggaaattatataggccaagtcttcaaagggatgccatgtggctttatgtgatgctgagacattcatcttgcagaaaaacgcaagggatcaggtgatgatctcatgatactaactagtggaaacacaaattcaagactatgggtggtgtcaaaacatcagatgtcttctagaaacaaacagcttttctatatcagtgaggtgtgagaagagatggcattgacgtctgacaggatggaaaggggggttgcctgtcagtgactgtcagttgaaacgctggtgcagatcttgaagaatttaagcttttttgtggcccccctggttgttggcgatcttggggggatccccgtggccttccttttttggtgtccgagatcttctgggaaattgacgggagtagttggtcacctgaggctattacgagttcagagagtgaaatgagggtatagggcctggagcatcaccccctcatggaggcaagtgaacctcggagtgtccgggtgtttttcggcttggggttacaagtccagaccggcgtgggtcggagggcggctcccgcgctgccgagccaaatcactctcggctattgtgtaactggatcccgctgccaagaacctgttttcccacaccccccactgtttgacctggtgaattgctggttgggattggtcaggtggtggggaagcctggggaagttatgagtggaaaaaaaagaggaactgcgacttcacttttttttcctgggtactaggcaaggctcagaattttgtggtggtgtttttttttcttttttttttttttccatacctcgttctcgttcttgttctgccccaaatttggacgtgatccacttctttttttttttttttttcccaaaaacccttgaccccgtcgtctccggttcggcagactccatcccacatccctcctctttccgttgttgtcctgtcccagttgtccagcccccccctcccctccccttctttggcaggaacagtcatcagacacctttcgttgttgacagacaacttttttgttgcgcattgcgaggcttgagtcagaaaccctttacctacccgcgagtcccaagccaccacaactcttcctcgtgtgacacaaaccttcgtctgtcattttttttgttttttaaacgacgacctcggtttctgtttttctccctcgctcgcaatctctttgcggtacgcaacccacgtcttttgccagcgcgcaaattgactcaacttcggccacttcgcgaccccacactttataggctgattgcgacaacggcgttaacggcttgagtgctgttggtgctgactgaaccagttcaacgtcgttcgtttcgcaaatatcaagcatctagactagacacacaacaaacatgtccaaggtcaccgtcgtgaaggaggccgtcaaagagacgctggttgggtcaacagaaccacaagagctctcggcccagaccaaggcgcgcttcattaagcatgccatcaaggaagatggcgccgagccctacctcggccccgacgagttcatcaacgctgttgcccctccgtcggaggattacgtgagtcctttctgcactggctggcgcattgtccagtccagcaccttttctgacgtgtgatctttatatataaaatagcacaagatcaagcgggaacagtactcgatcctgttccatgttgccgaccgatcgaacaagggcaaggtgacgctcgccgactggggttactttgagaaccttctcaccaagcccgatgccgaatatgagatcgccttccgcctcttcgacattgagcgcctcgggaaggtcaagtacgaggacttccgcaggctgtacgagctgaacaaggggccggatagcatcccattcgactgggagtgtgactgggcaaagctttacatcggtagcaaggcgaaacacagcatggactaccagcagttctcgcaaatgctgcgcggtctgcagggtgagcgtgtccgccaggctttccagcatctggacaaggacggcgatggctacatcgagcccgaggagtttgagcgcatcatcaaggaaaccgcgaggcataagctctcggactacctcctcgagaacctgagcactctgtgcaacatttctcagggttccaagatttcctacgccaacgtacgagctttccagaacatgatccacgagatggacctcgtcgaactcatcatccgccgtgcttgcgccaagagcaccgacggcaagatcaccaggaccgagttcctcaaccaggccgccaagatcacccgcttctcgctcttcaccccgatggaggccgatatcctcttccacttcgccagccttgatgagccatctggccgtcttggcctgaaggacttcaagaaggtgctcgacccatcatggaggagtagacaaggagatgaggatgccgtccgtgccgtcaccgagaccaccaggtcggccggccaaaagttcctcgcccagggtctcgagtccgcctacggcttcgctctcggcagtatcgccggtgcttttggtgccttcatggtgtaccccatcgatctcgtcaagactcgcatgcagaaccagagaggtgccaaccccggccagaggctgtacaacaactcgatcgactgcttcaaaaaggtcatccgcaacgagggtttccgcggtctgtactctggtgtcctcccacagcttgttggtgttgccccagaaaaggccatcaagctgaccgtcaacgatctcgttcgtggatggttcaccactaaggataagcagatctggtggggccacgaggtcatcgccggtggtgctgccggtggttgccaggtcgttttcaccaaccctctcgagattgtcaagattcgtcttcaggttcagggtgaggtcgccaagtcgctcgagggtgctcctagacggtcggccatgtggatcatccgcaaccttggtctcgtcggtctgtacaagggcgcttccgcctgcctgctccgcgatgtgccattctcggccatctacttcccaacctactcccacctgaagaaggacctctttggcgagtcccagaccaagaagctcggtattcttcagctcctcactgccggtgccatcgccggtatgcccgccgcctatctcaccaccccatgcgacgtcatcaagacccgtctccaggtcgaggcccgcaagggcgacacccagtacaccggcctccgccacgccgccaagaccatctggaaggaggagggcttccgtgccttcttcaagggcggtcctgccagaatcatgcgttcgtcgccacagttcggtttcactcttgccgcgtacgagttgctccagacggccttccccttccctggcaagggcaaggccgaggtggcgactggtgttgcggacgttgtgcagacgctcaaagagaagcaccctgacagcccattctaccggtcgagaaacgcgctcaagattctgttggatctggatgagaactttggacgtgcgccgttgggggtgaatgcgaaggggtggcagacgctgcctgggtggatgcagaacccggtgaagagctcgtaaagagggaaaggaaaaacaggggggggaagggagagagaggttaaatggctgggtttggggggtcagggtggtattaagtttcggccggttcgttgtttataagcgcgaaggacgcggacgggtggacggacggccctttcggcaatggggaaaggtgttgtggggggtggagagtccggcaatggggttcggaggtcctgtccacctcacctaacccattccgccgccaacggggggacccactgctgacttgtgtcggagcgcatcatgatgtcaagtcatggtgttgggatggatttctttgatgtccttcttcgtttctctatcattgagagttttgaagagggattatctaccgccgacgacccatgcggggtcaacaaagaccctgccaccaccaccccctccgttctttgacaattgagcctgatgaaggaggagggccgggtatttttttttcacgaaaaagcccgatttgcattttgcatttccatgtgcattttatttcttcttcttcttcttcttcttcgtcagcggcagactaggcggcaggcaggcgtttgggtggttatttaatcttgtctgggtggcagcaaaaattgttcctttttcttttgtatttttttttcattttctcttgttgatattttgtcgcgcgatgtgtttttgtatgagatgaatgaaaaatatcctggctttttttgcttgttgctgtgtgctacgttttgagagaaaaaaaaaggggggaaagacactgaaagttagatggatggatggatggatggatgaagggctggctagactttttggttctgggagttgggatttatacagtaggtgtattgtagatatcgatacaacaacgagacagacagactagactagagagactagatgggggttggggggtagatgtggtagattagagagagggaagatagaattgatgatggttttttgagatgttgtacaggtagctagttggttgatgggtagtagagtaggtggctagtggtgttatgcaggatgaaatctgnnnnnnnnnnnnnnnnnnnnnnnnnnnnnnnnnnnnnnnnnnnnnnnnnnnnnnnnnnnnnnnnnnnnnnnnnnnnnnnnnnnnnnnnnnnnnnnnnnnnnnnnnnnnnnnnnnnnnnnnnnnnnnnnnnnnnnnnnnnnnnnnnnnnnntgctaggaagggagctcagactagaaatctacacccacctcctccacctaccactccccccacactcaggcgaggaatcacccccttatcgatcaacaaccccccctctgtcaacctttgccgaaaaaccaaaaatctggacagcgattttatacgtctcccgacaaatctacatcgagagtcaccccctcttgtacaagtcaaacaccttctccgcccaccccaccctcctcaccagctcccctactttgtatccttcctccaaggcatataaaaccccccttgcgacccccctcccaccaccaccaccaccaccaccatcaacaacaacaacaacaacagcaacagcaacaacagcaacaacagcaacaacagcaacaacaacaacagcaacaccccaacaagaccgaccattcacccccccatcccaatcccagaacatcatcacaatccctttatcccccttcatctccgccccgacaaaccccccctctatatcacctgcctacatccccctgataaggaaatggaggcttcggataaaactggacagtccagctccgtggtctgaggatctggtgagggaggtgttcacgggagtgggggagttgacgttggatgtgtggcagagttctttttggggtggggtgggtgttagaacactaaaagggtttgaaggggtgaggggggtggggagggtgagggttagggggatgttgggtgggtttgagggctaccgggggtggctggaggggatcatcggggacggggttggggttcggcagggggaggtatatgaagggagggatgaggaggaggggaggaggttgagggggtggagttgacttgtcaaagggggatggctttaacgggaggggggggggggggggacaccgttgagggcctcatcggacatggcaacggttgactttgatggcgccttcaccgagccacggcaaagtgcgggcgtcactaggtcattgtggaaaggcgggattaactttaacttcaagtacacgtattcagcttttttggaatctaccatctttttaattcttccaacctctctccaacatcggcgaaaggtttgatcggctccaagagctgcgggcccgggacgagctgcctgatgaggtgtatctcgagggccgggacaacgtccacgaggagaaccggcggttgaacgaaatcaaaagagggatcaaacaatcctggaaggagatgctctggatcagggaggatatggaaagggagattgggcacctggaaggactacgactgccgcaatggacacccgaggtgccggcggactcgagtgatgggacgacgaatgctgcccctcccacattttgcacaccggagtgtctcctggggctggagccaggcagcaagccggatttggatgtgaactgccccaatgtcggcagccatcaaagaggactgagcgggaagcatcgggttctcagggtacagttgggtcagcttgtcagggaccagctgcggcgagagcagaacaatgacaagaacttgtggttttgcggggacggcctgccgggacagccaggaaaaagcaggctgggctggcttacgcttcaaccgcatggctacacttttatggtgaaggggtacagctactggtggaaacggcaggcgaaccgcgagatgggtatgcaccaggattgatggtttccacaactggaatgataaactggagaggatggtgccgttgtgctttggtatgtttgacttgccggctccgtatcagctcgacaccaaaacagacgacgcaaactggctgctgggggataatatcgggtacatcttattgttctcttctggagcggttgctggaccaaagacatgctctccaagcttggagctcaacgaggacatggcaaacaaacgattagaaacgtccatcatggggcagtattggatccgattccccaagggccaggagggattgcctgctgtgtggaagaaggggcggctgatgtcgattggcctcgacgagggagaggtggctgaatggaggaagcatctgggggaaaagttggaaggatcaaaacgatcgtcaagaaaaaggtcagtggaggtacacggcgaggttggctgaatgtcaacacaggaaacacaactaccctaacccttaaagttgtgcacgtgcatgtacacgtgcaggtgcacaggtgcagcacaacacacggcacgctgtctgacgcaatgacccactctttgtgcctgtccatcgaggttctctttcatttccattgaacatcgcggttgcatcggcatcgggtgccagtgtcctcccgtcaccatgtctctcctcgagttcctctcgtccgtctttggctggatctacttcatctgctggtccctctcgttctacccgcagtccatgctcaacttcagccgaaaatccacctctggtaccacggtcgacttccccctgatcaactgcctgggcttcctgtcttatgcaatctccaactacgccttctactacagccccctcatccgcgcccagtacgcctcccgctaccacggtctgacccccaccgtccagttcaacgacatcaccttcgccctccacggcctgctgctcagcatcatcaccacttcccagtacctctccccccgcctnnnnnnnnnnnnnnnnnnnnnnnnnnnnnnnnnnnnnnnnnnnnnnnnnnnnnnnnnnnnnnnnnnnnngcatcgtcggcgtcatctttgtcatctttatcgtgctgtcctccccggagaggagcgacccatctggaggcggccatggctgggtgtggcttgacgcgatctacaccatcagctatgtgaagctcattgtgacactcataaaatacacgccgcaggtgctggtgaattatcggaataagagcacaaagggatggagtattgtgcagatcttgttggattttagggggggtgtgttgagtattggacagcaggggattgatagctggttgcagggggattggagcgggattacgggaacccggtcaagtttgcgctggggaatgtgagtatgatgtatgatgccgtttttatcacgcagcattatgtgttatacaaggggggggaggggaaggatggggagggggagggggtgtttggggcgcgccggcacgaggagaggaggatcgagtagggctgtggtagaaagatgctgcctcgaggcggctgggatataccttatggcggctgagatgccctgggctggtcctttggggcagatggaggttcgggtggtgccgttcagagacatggtagacctagacggtctggagtttgggtaaacagtgggaacgggtctttcaggatgctagatgggggagagagggaggaagaggcaatgggggagagaagacacgataagatacccatgatctgtcaaagcgaatacataattgctccgtttggcttattcaccacataggacatctatccagcagactggagtgacgccccacacaacaaccctgtttggggatgtggtgggttatgagaatttaagcatgaaagaaggtgagggccaatatggacagggtactggagttgttggaaggtgggtgggtgtggagggtggtatgtatgtataccgtggttgctccctctaggctggctagcctagggagtgttgacgcgtgctggtcgttcacagctcgtcagtccagcccatgatcgaggccgcagagactcttagtcttctttgctgtcacattctcgccatgctaagggttctcatgaacagacctgtctctctacagcggccaacagctctcatcagggatatttcaactacagtatgatgacagaaaagcgaaactctttatgatcatccccctttaaatcaacagctcgcactcaggtgattaaatactcannnnnnnnnnnnnnnnnnnnnnnnnnnnnnnnnnnnnnnnnnnnnnnnnnnnnnnnnnnnnnnnnnnnnnnnnnnnnnnnnnnnnnnnnnnnnnnnnnnnnnnnnnnnnnnnnnnnnnnnnnnnnnnnnnnnnnnnnnnnnnnnnnnnnnataaaagctgaaagttgttttggtgatttcagaagcaactcccctctatccctcactgcaactccctaacctccccatcccccctctcagtaggcagttctgccccccgaccaggcacgtaccccccctgctgcgccccctgctgtccataagggttataaaccggcggccccccaaactgctgttgctgctgcccgaactgctgctgcggaggcgtcaccgggttcaagttattatacccctgcccaccaaactgcccctgatcctgttgtcccccaaactgttgctgtccctgcccaaactgtccctgcccaaactgcccctgcccaaactgccccggctgttgattctgaaaagcatacccccccggcggcggcggactaggcgtcccatgcccctcgaaacccggactgctctccccccccgcggtggtcgtgctcataaagctcggcttgacgacactccccctcggatccatcgggctgaatccctgccccccactgccgggataatactcggagatctggttactcgggtgctgggagttgctgaaggagaggtgggacgatggtggaggttgggaataggacaggtgacttgatggagggggcggactagtatgattaacctgtgccaccgggggttgggggtcaggcgcgggtcggtttcggcggtttcttctgatcaaaaaccagattgctagaccgacgatggccagggctgcgattccgcctactaccccgccgactattgggccgatgggggtcgaaggggggttttctggagggggtgtgttggtgggggtgttggttgaggtggtggtggtggtagtggttgttgtttcagtggtggtggaagaggaagggccggctcgagggaggaccgtggcgtagaccacatctgatccggctgccacaccgcatcccatgagggtatacgaattcggaccgttcgccagatcagcatagatgtgcgtgaggcagtgggggtattccgtctggccgcaccagagcgtgaagccgtttcgggttgtgaagagggagcggtctgtcgagtcgaggcagcgggtgggcaccgggcagttgctggttgtggtgtcgcagcagccgatgtgggtgagaagggcgttgtagtggcaggattgggtgatgtcgcagtagagggggattgctggtgttgttagctggactgtttcattgatgacaggagaaaaggggcgtgtttacaagccaaaccgctgacgtatccgcaagtcggtcccttgagctcctcttcgctcgaacttctggtgccggtgacactgatctgtctcttcccctgtaacctcaagataacctcatccgtctttgtcccttctggcggcgaggtcacagtaggcgagatccccatcatgtaatccttatgatcacacccagtctccttcgccggttcccaccgcgagctcattatcacttccccatttgaaagctttagcatctgccagcccggcccaacccagcgcgagggcaccttcaacaattctacttttcatctttgttccgcgtgagcacccagctaggttgtaagctcatagaacagccaataccacctgccgtccacagcgatatacctctcgcgttctgtaaacaaaactggcaaaaatcaacaaccagtcaaactacccccaatccagttgaaacaaaaaacaaatctcccatcaacggtcaaacccggccacccggaacctttttaaccacactccgaacagcaaggctcagcccaatccccccccccatatcccagtcccataacccatgtccatcctaccaccgcatccttcagctgaaagcaatattgcatctaaccccccttctcccattggccacctcccccccgctcacccacaaacccacccaaccacatcatcaagtggcttcctctctctctttcttgcagcattctctcccgactttcctccccacgagtgagacgggaaatgcggcaccgttttcccaccatctaaccaaacctgttcccttcggtggcgtttcctacttgcacatcatctcccacccaaacgaggctgagccctcctagcgtgcatctctgcggtgttgtcccagtcgcaccccaagcggggggtcttaccctaaccggggtttctctctttgctctccagcaaaagtcccccccaaacaagcttgtcccgacgatcattcccccccccccaagaaagtaagaaacaaggcttcggtggaggaacatctcgccgaccggcactcccatatcactccccacatcagcaaaagctcagcaaaacctgatgaatcgggcttccagtgcggagtgctagaatgaggtgacattagtttattcaggccgtctgtcgtgcaacctacccacccaccacccggctcaaaatgcaggggtaggtgtgggtgtgtggccggctggcatggtgatttagtccaatgctctctctcatgagcaggtgcgggagcgggcagtggtttttgtttctcgtacgaatagcattgttgatctcgaactgatggcttttgagacatgcattgcatttgtatcatcaggcaaggcagacaactctcgtcttcatcccgttagatgggtgtcttcagtgggttggggatatgtgtaaaatattggcaccaccatgatgaggctcatcaaatccaaccgtcacacacacacacacacacacacacacatgcaacaaccccaagacatccctcaacccatttcccataccaccatccataatcaaaaaaaaaattaaaaaaaaaaaaagaaaaaaaaacgacacaaaagtacacattcgctgacctcgcctcaaatccagactccgtgccagccagcaaagcaacatttgtgagagcaacacatcggccccaaatagttcccttgtctgaggtaattccttattaaactccccttccatcctctgacataaccctcaagtcagatccatatccccccaccccccaaatcccccccnnnnnnnnnnnnnnnnnnnnnnnnnnnnnnnnnnnnnnnnnnnnnnnnnnnnnnnnnnnnnnnnnnnnnnnnnnnnnnnnnnnnnnnnnnnnnnnnnnnnnnnnnnnnnnnnnnnnnnnnnnnnnnnnnnnnnnnnnnnnnnnnnnnnnnactcccccccgcgctccccaaatcaacccccccgtcataattattatccaccccccctaacccactcgtatcgatactcatcccctcaacaacactaaccccatccccaactccttgaaccgcagcagcagcagcagcagcagccatagcatcccccatcacatccccccccacaacccccaaccccgaaaccatatcctgctgccccaacagccccgccaccgcagtctgcggcatctccatctgcccctcaacctgcctatacaacctcaccaccgtctccgccatgaccgggtcctgcttctgaatccttttccagtcatccgcctcatgcttgagcacctccctcagcgtcaacctcctctgaaccggcggcggtggagcagccgcaaaggcacccgccccgcccgctgtcccatcgttaggcgtgtcagacgaagccaacgaggtatcgttcgtcacatccggcgcgcagacaagcgaacaaaccacatcatacgctacgctcccctgccccgactccgttaacgtcttcagctcatccagcagcacagtcaaaagctgccttgccccgagcagcttgagcgcagcaagcgtctggcggtgggtgtaggccgtcggcgtggtattcccccccagcggcgcttgctggacccaattcgccaggctctgaacagtgtgcctcaccgcagccgagatccccccatccgggtgctgcgcctgcggtggtcgatttgttgctgctagaccgcccggtaatggagtcgcattcgggtgactcccaggcgtgtggctaccatgcgtcgtcgtccacgactcaagctcggcatggtcagccccgcccgttcgcctcgagaccgtgaggttctccttgatggctctcagcagcggctcaacctcttgagatttggggtccgagcgttgatatgatcgtagggcgtgctccaatggtttggcgacaatgttgaggactgattgaaacatcgccgacgcctcgttggagatggaattcggccggatgagcagctggagaatcttgatgatggacctctgcccttctgggccctccgcccagagctggttggacagatataaaatggctggaaccagcgagggcaacaaaaagacctcgaccaaatctgccgcagtcagtatcatccatattccggaccaaaaatgaaactcacattcaagcccactcttgagcgtctcctcattcaagaaccccgcgctcaaggccgccgaaatctgcccgaaaagcaccggcatgagcaagtagaaatcctgcggaggacacgaagccatcaactcaccccccaacccccctccgcaaacagcccctgtatccacccattaaggtgcaaatgctcctgcggactgagatccgaaagcagcctcacagcatgccctcccccaatcagcttcccaacaaacgaatccggcgacctcacccccaagtccgccggcgagatgttgtaccgatacacaaacgccatcagcagcagcaacaccgacccaaactcctcgtacaccggctggtactccccctgctcctcatcataccccccccaatgatcaatcagctcccgcagcgggtgcaaaatcttttgcgccggactgaagagcagcagaatatccaacgacagcggcttgctcgccaactggccgcacaactgcttcaaagccatcgtctccgtgtttctacagagactgccaatcacctccaccaccgcctgcgcagccgcccccacgttcccattcatgttatccaactccccaatcagcttttgcgtcctgtccgagtcctgcaggcacgactggaccagaatatccttgacataacgcccttcgtccggcagcgtctggtaggtaatgtctcccaaaaggttctctatagccgcctgggacaacaacccgtgaagctggcaggcaaagcaaaagtcttgtcgtaccgagtcctgaaacgacgacccggtgttggaggacatgtcaaacatgcccgaaaaggtcgggaagatgtttgtatccacctgacctaacgcctcggtgatgcaaatttcgggattgaacgtgtataatggcgaggattgcgcaagagaaaccaaaactagtggcaccttgttgaccacaaaagacttgagcaaatgcccggctttggccccctcgttgcgaaagacggcgttcgccaagacgtcaaatgatgccaagatcaactggacggctgcttgctgaacatcacccctatatctgttgtgtagatatgtgaagagcgccgcatcatcaatcatggggcgcccaacgagctgtcacttgttagcgcacaaaccatcagataccggaccaacacgtactgcagcgctcagatagatatataacccagctcgggtgttggcgatgggaacttcggggacctgaaagctttccaagcccatcacgttgtccatgtagctgttcatgtctgaaacggccgggtccttcttttcggtcgaatcgtgcgtcgcgagactctgtgctcggaacatgtcgagttggctggcaatcgagggattgacctgcatgatcgagggcagaaaagcctccaaactttgcgaaagctgtttcctgatgcctattgcatcagtagttagcatggggacattcggcgccaccaaaaggggggaactggcgtacctttggctgctggaatctgaaacgtctttggtaccgttgggtgcgcgctgaaggcattcaaaaacatgatgaatgattcgcgcgacctctccatccccagcttactggcattcaaactgtgcatgctcccaaaagcatcctgcgaaaagatggtcgcagcctcggtgaacaaggccatccacctcaccagcatcctggatgtctcgacgacatccctgccgctcttgatcccaattccttggttgactgtttgcgccaggcgccaaaagagaatggcctcggaggagtatgacgatgtccatcgttgcagcttctttcgccgcggcgcgctcgcatctcgttccttggacggttggtcttctggttgtgggtgtatcttggtgtgtatggttgagtagttgtagagggctttgaggacggaagcggtgtcaacgcgcctctgcttgataaggtgcgtgaggtagagaggcgctcgcgggtcgagggcgacattgttgtcggcggtgggccggaggaggagctcggcgatgaggccgggcggtagggggtgcttgacgaggaggatcttggagaagacggcgaactggtcgggatcgagacgttggagtctggcgcgggtgatgagctgttcccatcgggccacggctgcaggcaagcctgtcaagctcgagcctgctgtcgcggggccttccatttggctggtggccggggtgacatagagatggtgtctaactatggcatgtatcgtggctatcgcatgctgtagcaggtcgcagagagtagtcacctgtactgggccattggttctttgtgtgtgatgggttcttttgttggagccgaagttccattaagagtgagagttgcggcgcgcgcattgagcagcagcccagcaggccattggattggggaagtggggctcttcgggggaagaacaggggccctggagatccagacccacccaagcttcggcccgcagcagttggtgtccgggtggtctgtgcacctaccaagcatttaacttcaacctctgatttccaccttctgtatttccatctcgtgtcacgatgctttgagtgatgatatccatgtttatcgcggccattgctaaccagaaggcattgccatagctatcgcacctggttgatgaaccgagccctcacaccctgaagaggccagtcttacctcgtaccatacatagtgctcctggtttgttctgatccaaatcaagaccagcccagtggttaatgtcccttgcctgtttcttttagccctgtgtagcaccttatgtagcagagaaaatcagccacggcacggccccttgtgcgatccactcctatcttagcggtgattgcttttgaccgaccaactctatcccgtctcatttattttctccctaacaacctcctctcaccccaaacaccgctcaccagccccatcatggatccctattcaatgcagccatccgccaaacggcagcgtgccaacacagttgatgacgatgctgggtcagacgccaatcagcacgctgttagtatttccccacctacgcatttcacctcacctcatcattcattcacccactaacagtcgaccaagaaccctcaatactaccaaacatatcaatattctcaagcaccggcctactcacaggcacctcagtatgcccaagctcagcctcaacaggctcaaacccagtactaccagtcttcccaacatggccagaacccacagtaccgtcaaacctcacaagacttgacagggtctgggtaccctcaggcgtcccagtaccaggctgcacagtacgcccaggctgcacagcattcccagtaccctcagtacatgcacgcttcacaggcctcgcagacttctatctacgccgctcagtatagtcaacaggttcatcaggctcagcaagcccagcaggcccatcaggcccatcaggcccatcaggctcagcaggcacaacaagctcaacaggtgcaacaggcacagcaggcacagcaggcacagcaggctcagtatgttcaacagcttcggcaagctcatcatgctcaacaggttcaccaagctcaacaagcccagcaacaggctcaacaagcccagcaagctcagcaacaggctcaacaggcgcaacaggtccgacaggcgcaacaggcccagcaggcccagcaagttcaacaggcccagcaggcccagcaagttcaacaggcccaacaggcccagcaggcccagcgggctcaacaagctcagcaggctcaacaggcatcccaatctccgcacacttcacaggctgctcataattcacgagcgtctggagctccgacggaatcgcggacgcccctgaccctccaggccctccttcaagaaagggcctctcgcacccctcaagaagattcccggggtcccggcagtcatctaactctggacgacgtcagccccatgttgcctaggtccaccgaggccgagctcagcaaaataatcaccagtcttgaccttgttgcggcccaaaagtttcttgctgttgcggcccaaatgcatccggatattggttacatgattgccgagtatggcaagacgagtgaccaaccagtaccgccggccccaaccaaagaaccagtcaagccttcagtggaaaccgtagtctatgagcaggattatgatgtaaacgacgagtacgacgacgaacccgatgacgaagacgacaaccagcgcaacgcccagggcacctccctgaactttgatcatctggctgaagaagcccactacatcctcaacgtcaagtacgaccgtttgaacgcacgccagcaatatgatcagtcaggcgacgcggctgaaagcctagaacgatgtgttgtcaagatcctcaagcaggtcaagaagaatcccgactatggcaccaagctcagtggggtgacaaacctctggaagataatctggtatcttcttacttcgccaggcgcgttggctcatgagattaagaaggacagccaggactgggatcagcaattcgtgaagcttcacaagtttatgagcaaagacgacattgagaggctcaaggtccaggacgtggacgggaagaggtggcctgagaaggcgaaggagttggcggacgaggcggatgcttatggtctctttgaggaaataagggaggtgttggatctgctgcagaagtgagcgggcaaggtgcaatggggtaagctgttcacatatacagacgcggtaggtaatattggttgtgctggggtttccatctctgaggtgcttgccactgtaaccgtttttcttgggtaggtaggtaggtaggttgctcgccggtggttgctcttctgatctgccaccttttcagcttgtagcgcctggcttgagatggtcttgtccagcggtcaaccgatttccactttaacgtgtcaatctaacgcgaaacatgatcaaccggtcccgcccttgcccggccaacgaagctcggggcaattgtaggacccctgctcacctatttatgtgtacttcaacatccacatcaatcaaccaatatctcctccctcaccttttgtctttttgttgtgcctttgatctgatataccctcaccaaaacaatggagtctattgttcccccagcaaagcggcagcgcgtcgactcattctggcgatcacgccgccgcgccgcccgcctcccgcctcccggtccctgcccaaacacgagaggtctgaactcctcgaaatgatagccacgttttcatacaagctcggatcttcgatcctcgtggaggctgccactgcttatccggacgttccgagcgcatcgccacatatcacgaggacctggacccgtgggaaaagcatgtggccagtgaggatgaggatgaagaataagaagcggaggaagaagaggaagaagtggaggaagatgaggaagaagatgatgaaaaagaagaacaagacccctcaagagacacccttcccccccccccccccccatctccctcgactgctacaccagggaggcgcactccctcctccacgacaaccccccacccgctctaaactagttcatgatgggcactggcgacatggtacccaaagaccccaaaaaagaaacttttgccggtggtgaatgaaaataatggatccacgcgtaatatgaactctgtttacaaagacttattcttaccaccgccttcaaaactttggaagggtgtcgtatccttttttgtgcttacggctctcccaacgactggtatcaaagggggaggggtatcnnnnnnnnnnnnnnnnnnnnnnnnnnnnnnnnnnnnnnnnnnnnnnnnnnnnnnnnnnnnnnnnnnnnnnnnnnnnnnnnnnnnnnnnnnnnnnnnnnnnnnnnnnnnnnnnnnnnnnnnnnnnnnnnnnnnnnnnnnnnnnnnnnnnnnaagcataaaccgtatgcaacagttgacgccaccgtgctgcctcgcaatcgcaatcgcaatcgcaatcgtaaccgcagacgtaaccgtgggcgcgtgcatgggcgtgggcggtgtttttggtaattatctggttgtggttgctggatagcgtggtcgagagtctgggagggcttgcgcttcttgaggactcgtggcggttccggtgaggatattgagtttataggtggagcactgctaaggggcttgtgatatggtggttagttaaatttcccacacaatttctttcttaccatttttcgtttttttttctttcttttccaaattcatctccatcagaatacttgttccccaaaccgatccaagcctgttcgtctccatgtctttgcatgaccacttcggctccgagcgtgaggctggatcttgtcaagaagctgggccgagaggtcaggccagaacaaaccgagatgtctgcggcacttggagataagaaggccaaacagctcgtaagtagtcgaccactctgtgctccattttcgacgttgcggtccgggtaggtcattttttgttcttacgtttacgtcaggatttgtcttctcgatccctaagcccatcagagtccgagatccaaccgtcgggaccccggactattacacaggcacacgaggaggagacactcgatgaggaggcactcgacaagtgggatacactccaggaggaggcagacgccatctttgagatgctatactctctcaagacagtcgatgacgtccagccctatactctcgacgcggcactcgatcaaattaccagattttacacaagcattgtgaaggcagtccagccggcctcctcttaccgcgaaaaacaccgcgctgccgtcctgctcatacaagtcttgtcctggatcgtgacatccaataaattgataggacaagatcttcgggaatatgtcctcggtcaaagcgcggaggaagaataccggcaatgggtcgacccgatgagtgacgtactcagctgctgcacgtgggcggaacgccgtcgtatattcaagagccgccgttggcagtgggagtttgacttgtttgtgggcctggtgatgaactgtgaactatttggcgagattttcggtttgcttgaggtggcggagcatagggaagagatgttcgtctccccccgccagagcgatccagcgccggcccagcagtctgacacggaggacggcacagtcgaggacggcatggtcgacgacgctatcgctgtgtttgaggatggggaagatgaggaggagattgttccgcttgctggttcaccagcccggtcccggtcgcaggtgcaaatggacgtggcacagccacgtgaagaggtggcggcccaggctggcagggaagcagccgttcagcctgccgcgggagaagcagaacccaggaacggtcaaggagaaccgcggcctgcttggaaggcaactggaaagaggagtcatgaaggggtggacgcagggcagggaccgagaaagcgacaggcccgttctcctggacgggtctcggttcacttgcactttcacgggaccgtccagaatgtgtacctgggcagcgactcgagatcataaggtaggtaggaggctgtgggtcttgtttagcgcgttgctcttcactttattgtatctatctgtgctgtgacttttcggtgggcggatcttacatgggtactcggagagtctcggggaacttctgtgagggatgttctggcgagaggctcgtccggaggccccggtggtagctcataggtatctaggaacggaaagtacgcgcgtgaaaccccccatggagggtctttggcggggagataacgataggcatgaattgtcataagaggtcaactgaagatggggagctcccaagggagcatgccagctcacaacagtctaccgcacctgcctcgtcaccaccaacctccaagtcgcatttcatgtcgcaggtaaaagtcgcaaaccaacctctgtcagaccatcccgacgagcgagacctctcctgtcaccgtgacgaccctcgactccgccgagctcaaggacatgatttccgccctccccgattctctccttcccacccttctgttgactgctgccggggcccatcccgacatcgctagtctgattcaggcccacccaaacttcgagatcctattcaatgggatagagacctttcgcaggatgttcaagagcacgttgtaccgaaagggccaaaacgaagaagcggtgtatcatgttcaagcggttgagagggggttgtggtggaagaaaatgatacgcatgctggaattctttgatgacgagggactcgagcggctctatggtaagaagaaaacccatccggactggatcgccattacgtggaaggatgatataaaatatatttggagggattggaattgcgactactatgatgaggatattgagaaaggcttgattgagaatctcgtgacggacctcgctaggattgaagggagaagcaagacagagacgcggaaggagcagaaggaatggaaagactgggagtattgggaacccttgaagtggtgggaagagtgggaagaggatggggtgcatgagtgggaaggatgaatggcaatgccaggtttatgcaaggcgtgggcaaacccgatgcccaacggaatgggcctgagagcatgccctcaggctgtaaatctcgagtgagcttatcctaccgtctccgtcttctcttccaagttgtacagagggatttataacatttacgcctatatatggagactatcatgtgaaacgaaggcttcaaaagatgagaggtacgcccccgaccgtcttaacagccctctcgactatcattgaagccgtttaaggcccatcaaccatctttgaaggtcctattcatagtagcggtgtctctcgttgcttttacgacgtgcctcctcatccaagccgccggaacccgctccaacattttccccttcctcgacaaacccaaccaagacgcccgtcctgtctagacagtctaaccttgaaacgggcaaatatttatcacttgttaaactgcacacaaatatttttgtttctaaaagtcaagatgggttgtccttccccaaccacattgctccaccacccaccgatatccaggttgtgaataggatgtattgtcactttagtttttggccatgcctcctgggatttatcatgccagagaatgtacctgactcacatcgcaagatttggggaggacactggccctttctccgttgatgatccgtttcttcgaacgggagataatcatcaaatggcaggcaggaacgatgtctgcaggcagatgacctcatggcccactttgtttgtttgctcttgcctttattcataggatctcgctggcagcctgacaccccgcgatgcttttgagtccgtttgctcggtgggcaggaacgactcaaagaggcctcgctcattgtccgcctttctatcttcctctccgactctcttctccacacccccgttgctgtctcgatcttctctccctcaacaccaggcccgaccgcatccggcattgagaactctaccgcaaagatgccctcgtccaaggctgccaaaaagaagcagcgcctcaagaaggcagccgctgagagaaacgcgggcgtaagtcgtgtttgttactcattgaacctgagtgacactgatactgaccctttggtagagttccgagatgacccaagaggacatcactcccctggtctccggcctggagcccaagtcctatgagcaagtcatcgtcgatgctgctcgtaaatttgacgatgttgccgatatggtcgtcgagcagcaccaatcacttgtcaaaattcgggcccatgagcaaacacttgttgccgactttgcccgaatgaccaagacaattgagagatccctgggtgcaaaatatcacgagcttcttgcccccaccacagccgaagatcgtcccacacgggtccgaaagtacgacaagaagctggccaacgacatcgatgccgctctgaactacatgaccgctgagatcacgccctactcgctctatgccaccaaatttgcggccttggacggcatgcgggctgtgttggagagcattctccgctgccccaagcctcttctgagcgctctatcccgacagccatcgttcaagagttgggacatcaaattgatggtggtgttgaagcatctgaactgcgatgacatatgcaagctcaagtgtgccaaattcagatgcggcgagcaggagacacctactcagtggatgaaagacatgaagcgcctgtgtctcctccacgagattacggacaaaaaggtcttcagtcattagatcgaccatgcctttcagttcaagtatgagagggtgcaagcaaccacgatcccgcaggctgtgaacacgaggtgaccatccgacagaagagtccggtgagtcctgtttgcccatctctgcctggttttccagaagatagcattccttggctaacatttgttggagcctgtgccctccccggctgaggcttcatcctcgcagagcccttcactcgagcccgacctggctgggccttccgagagcgtctccttgtccgagccggtcaagacagagccccccaaggcaaagttgaccaagggtgagctcaaaaacatggtctctccccttttcccctctattctcgagcagatcatgacctccacagctctcgcccatgcctcagtcatccctgcgctcagggccgtccggaagatcaaggctgcggccgaatcatcgatggcccaagactgggctcgagttgccggggttgtacacagcggcctcaacgatcgctatcgtatccgcaagacctaccgccacgggtttagtgttcacgcctatgtcaacgagtcggccgaagtcacggacgaggcactcaccaagttctatatggagctcaagaacctttacaagccccttctcgccaccaagatagccgctttggagagttgtcgcaaggttctgcaagatctcctatgctgccccgatgaactgagagatgccatttacttccatgtcggttccgatcaaaccaatacttgggccttcaacatggtgaagattctggactggtttgaaggcggggagatttacaagctggtcaaggacgaaacggatgagccgaatgagttttggacgaagcgcagcgtgccagctctgatggagcttgtgaaggacaaagcgccagtcggccaccccgacagaagggagttctttcgtggtggtctccgggaggtctggctgcgcgtgtatgccgcagtcatcaagtatggagaccccctcaagacgctcatgtttgagggcctatgtgtctgctgttattgcgacgaccttgatgaggaagattactgctcttgtgggaacggcgagggctttgacgatgaggaggatgaaagcttccatgaagcgatgttggccttgttgtctccgaatccttttctgctctgaatgggtgattttggaagagatttggcggaatgatcgagggaaatatcgtgggaaagcttgaccagagtagggaagggatatacagcaaattctttggtcactagctgggctgacgactattcattgtactgtatgaggttctcttgtaaaaaatactttattccatgttcattgaacacaatgcgtgaaacaccatacccaagacatatcacagccagaattaccagtcacaactccattgtgtcttcctagggtagttgaaaccccatccacacctccccctaccccttcaccccctcccaggcggacacacaaccagcctagaccttcacgtcgttaataatgaggcccgtgataatcccaaaagccgtgctacctggtgttttccatatgctccttacaatctacgcctgagcacaactaagctgtctctactccacggcactacctttagtactacagctcgttactgtataaatctcgcatgctccacctataaagcggcttcatgatcccatccgatggaatatcaaccccagcagtatgctccacactgatgtatcacctctcaacttgctcgataacccacttgtatatgaaattgatacacttggtcctggcgaggatccgctccggttgtacatagacagttcatggaacttaaagatcagatccgaattgagtcagtgtgtgtggtgttctaatatattgattactgtattgttaagtgcgaaaagacctaaatccatgagatattgaagatcgtcgaatcttattattctagctattttattgggcagcttcttgtcatgccagtagctatcttctaggccatttgactgcttccttacggcctacgtttgcaagcttagatgaagtcttcgaatgttgaaataaacataattaaaagggttgaagtatgggaaatgcatggtcttttgttacgttgatgtggggacaaaaagggggggttgcccgggagataaaaagggggtgtaaacaaacatctcctatcctccgagtgcgaaattattactaatctacaccaccacaaaccgaacacatgagcaaaataaaatgcttctttccctatactgttgatgctacatgatatctgtacgtcatattcccatctgaaccgttgaagacaacacatacgctgcctctgcattgggtctactccaggcttttactaataactgggctgttgttattgctcaacaatacaaagaaatacagacgaaaggtggcaggtgggaaggtaagttgttagactcaccgaagagattgcgtaaaagttttccaagtctatgaagacaatacatagttccacgtgattccctaagtgtcaaagacaacaatacgaccatggcacttgccccaatagcaattactggaaaaagagggcacgtgcgcacaagaaaatgtcttgttatctagacttatggaagacctaatttccgccttatttgagagaataaagacaatacgtcattgttcgtctgaagtccaaggcaacaacacggctttggcacttgccttgatagaaaaacgctcgggccatttgagaagactctctggtatatatatctcgttcctgtggctttttctccctctcttcctctctttttctcttcttcacagctctcacattggaagttttcttttcgtcttgaagctactttttttgtcttcacccgtttttgtcccacaattaacgtgaaaatacctaacatcaagcattgccaagatgtaccagtatcaggccagtcccgccgagctcgccctcataggccgtgtaagtcttcccttcaaccatcaaccactccccccccgccatgagatctcaaaagctaaacccctctgcgggaccacatcgccccttttatgaccccctacctcaccatcaccaaccggccccccaccatcacccacctacacatgttcactcccatctggagcaccctctcggaaaagttgactaagtttgactccaaagccccgaccgaaaaggccaagaacatccccgacatcctcgagagcgccaacacggccctcgcccagatcaccagcacctccagcctctccctccacgggaactttgccgctctcgagacgatccggaagattcttaccgcgctcttttgcgcgcttgtttggtgccgcgcgggcgcgaatccagaagcgagcacgctcgtccaacacatgcgcgggtgtacgggtgctgaggcgctgaacaaggttttttcggggctggttctgtggcagatggactggttgattttcaaggatgggggggcttggttggaggatctgggggttttggctgctgaggaggaggtggggttggtttgggggaggttaggagggtttggcagagcatgattgcgaggaagagggttgttttgtttgagaaggagcagagggaggcggagatgagggagtttaggaggattaaggagggtggtaagagggggggaggtagaaggggtggttggtgaatgatgatgaggctggtacttgggatattcggtggagttgtattttggtgggtttggtgtttgggttgttttatatctggggttttttgttgctggttggggggtggggagcgggttgaatggttatttggtttcgttgaagcgctgcaaaagcgcccgtcatcaacatggtattcgacagaatttgagattagttgatattgccgcgggataacatttgcctgctgcctgccacggccatgttgtgctttcctaggtactcatccgagcaatgaacatcagacgcctgaagcctgatgaagactcgccatatgactaacaatgaacttggtgaggatcacaatcttgatagcactggaggaagacggctggtggaaggtggaaaagggagagtactgggggactgctccaagtgaaatgttctcaccaagaaagcgtgactaggtgatctttctgcaagcaagtggggatgatggggatgatggcaaacagtgcttcagatggttgctctcatcctatctcgctgatgaaaccagcagttccccatacagttgcaggagagaaaacagagcaacaatccactagcaaacagtagacttggtctttcactgcctcccacttcttgctaccatagcccttgtatgttccggcccctggctctgttgccccctaacagcaacgacatggtcttattgctttgtttatatacatacccacgccgcgagcagcaaacaatattccctttttctcgcaacatcttcacctcgccttccatacgccatctctgcaaccacaatggcggactgcactcaacacaacccgaccgaggtcatagacctgatggatgacaccgataacgatgtaatttcctttgaagcatttttcccattcgaatgctaaccttcatgtagacgtcctacgaccaaaaggccgccatcctaaagctagtttcctcactcccagaccaagcactgctggaaaccatcatcgaagccgccacagagcaccccctcgttgccaacctcctccagcaaaaagccacccgagctagaaaaaaaaaagaaaaaaaaaagcaagtcaatactgaatggatgaccaagacgaagagaatagtcgacattttgactgtttactgcaagcataaggatcatgactggggtgtgacacagcaaccggagctcattggggcggaaagtcaaggatcttctcgactcgatattcgaaattgtcacgagggacccatcgcacagcaagtgtgatgctcttgaggcgatggtggtgctgttcagcaatttggtgtgtgccggtcttggtcagccgaggagtgtggcactctcgatttgagcagtagccatagtgatcgacgactgttcttcccgccctgacgtggtgtaccatggacagggcacaagtttctaagcagggggatacgtaatgtcactggagaggattttacagctgtgttgtatcccgacttcaacagagcttcgacataaaatcgtcagtgagggccgatatatctcccgatctcataggagactgctttacttgacatcgaattacagaaactggcaatctttcaaaaacaaccaacaggtattacaagatacttgcaaagctggtcttagtgtctgtgatatgtcgatggccgtgggaaggctctttccccgccttccatttattgccccctctgttgctcctgccttttgtgaaagcgatgcgaccccgcgacctcgcactgtttgtttacttttgtgggtgctcaaattttctctgctgctttttctctcttgctctttctgtcttctctccccacccagcacttcgactttcgccaccatcaccatggcaaagtaccaaccggccaagctggaggaggccgacactgcctcgtcggcggtcagagtggctccagaccttgggaccgccatcagcatcgcacttgaaagcattgggtcaaaagccgcagtcacctcgccattatgagctcaaaatcggggcattgaaagcgatgtgggacattctaattcgctttaggtcccgccccaaccaagcatgagtattaccggtaccttgtgttggagaggcgcattgcctagtagatagaaccctcccagaacaataaaagcgtctctcaacatcaggaacaagctgagctcgaccaagggatctgatcaaggttatataacagcctcgatgttagttgttctacacgatgcatatctctacatagcaacaaggtgtaacccttcgattacgtttcaaagaacagtgctgttaaatacaggctcactcgggacacttctacacaggtggatagatcacttcaccgtcagctcaacacatccaagggggtgaggaccaaaagatgcgacctccgtgatcgaaggggtttcatacaaattcatggatgtccctcccattgcggttcacgttgactagcccgaaaagcagggcattaagatgtgaacgagggctcttcaccgccttccatgggctcctgcctttttttgctcctgccttgttgctccttccgtttttaattgggcacaaaacggctctcctggaccacacaatttcactgggttatttttcgtgggtgccaaaattctcttctcctccctcatctctttttcgcccgtaatcagccaacccctcagttcaccatgctgaccacggcccccgagtcaggcgagaaagcgaccccagcctcgaaggaggttaagggagtggtttatcccaaggtaagtcgtcgcgtcttacctatatttccatgtcttgagaagcggaagctaatagtgtttctcaagcgccgtcggtccattcgtcaaagcgctatgaccgtttcgacttccatgtttgtaccagctgtttgcggttatcagtgaggacatcagtgaacaggcggtcggaggtgcccgtgagagtggtagtctccaggtcgacacctttctcaagcccctgcctcccatcgctcctgccacccgtggtcagcggctcctcagggcctacactaggttattaggctacctttttgtccccaggaaattgcttctctcttttctcttctacaccccacattcaacctcgcactcgcagctaccaccatggcaaacatcaagacggagaccgcggatgagggtgtgactgctgctgaccccggcgtaagtccctattcatttctaacggagtattcaagcgactaaccgaatattcctggccattctaggctatcaagaaagccccattttccatgacggagtccgagttgcgagagatcttggtgctggccatagatcgccaccccgcaatacatcccattgtccaacggcaccttgacaggcttcgggacaacaatctaggcggtttccaagacgactttgagaaaatccgttgcgaagtttacgcatgtgcttcagagccttgtttttccgatcccaaggcaatcggagcatgcatcaagcgatactttgagaagcttctgaacgtggctacccgagagtcgccatatgagacgaggtactcggcggtggagtggttccttcgcgtgctgaacctgcttgttttcaccagcgatcctcatgacgtgagaaaagagatctggagtcatacagatggctcttgcttgaaactagtgatgctggtttgccgcttcagaactgctgagagaggtcgactccttcgcgatcacaacagcctgatcatgctcaagatggacttgatcacagcgaatgccaaggatctcccggaacttcttcgcgaattcgagccaactatccacgttattaaaagctggagagctgagtcaaggggctaaggaaaatgagggaatgaacggtgggccggagttggaggctgaccagaggaaactacattgccggagtgctcaaaggattgcgaaggacaaggaacaatgggaacaacctgcagatagtttcactttgaagacaatcacaacccctctctcactaccagcttctctgatgtgacacaaacccaaaccctcatctatcatcccaatgaccatcccaccaccgacgcagcacatctcactaacttgacagctaccaaagaagcacccagacccaaccacggcaaccccttccccagaaaagacaccccccaccccagcgtcgtatccaccgacccgacaactcggaacgctgcccatcaaaagaggcatagaggagccaacacacacacgccgaacaacccaacgggcctgattgcctactccgcaaagcccgtcgtgaaatataaaatcaccttacctcctttccgtctacagactttagaacctgtccatcattttcgccccatcagtcacagcgccattatcaaaacaaatacaccaacacttccaccaccagaactcccatcttcaactctttcttccaaaacaaccaccaccatctccaccaccaccatcgccaccatcgccaccaccacaaccaccatcaagtcctacagacagtgggtacactcttcagcgacagcacaatcgcgacctcctggccttcacccatctacacaatgacgtcttccattcagaaaactgtataaaagccaaagtccaaacccctgtgtaacaccgaccctccctcccccttgtccacacagcatgacataaaaccctcccccttaactaaccccttcaacccagaaccaaatcaacaaaccaagccaacgcgcacctacctccaacctttcacaacatatcaccctccccagcccagttacacagcccatatcacaaccctgccatccctcatgcacctacccaccaccacctccaacaacaacccatccccattcacacatccaaccccgccctatcattcatcataaacttctcccaatcacaaacccaaaaactccagacaccaatcatccattcattaacctctacccaacatcatcatctgttcatgactcatccggctgtctcttcgtacacattccccccatctccatcatcatcatctcgtgtcaaaaaggccatgccatactgctggtatcttctcccctacacatcccgctcatgaacttcgtcaaggtctaataacccgtcccaaaaagaaaccaactaaaaccatccatcccaatatatcaacgaaaaagcttaacggaaagagaagaaaagaaatcatcgtaacccacccgccccctttgtaccccgcttgctatgcccgagccgacacaaagacaaaaaatgccaccatcccgaaaagcccaagcccacaatgccatggtttacccccaaaagaaatgacagccatataaaaaagaaaatttcgtcaagtaaggtatacagccctgccctcttctctctcatgttgtgtttctcagttttcttccctcttgatataaggcttccctcgtcgtccgtgtccgcccggtgggggggtgttaatcgctgtcagtcctctaggtcccaccatcctgttttctatttcgttagtcagctgtccttccctttcttccccgcctctgccagccagagtaaagactcaccaatcctgcatggccaaccactcgctccacgccgcctcggccgcctgaatctccttctccgtcgtgttttgcaacggcttcaaaaatggtatcgtctcctctgcccccatgtcatacgccgccttgacatccagccagctgttgctctttgtcgcaaacagataattcctcctctcctgctcgtggaactgccctatccctctctgccagtcgtccccaaagaacccatggagcacggccggaaagtcgaacccggtcgctaccagtcggcggatatacggcagcagcgagatgtgggatgggaatccccctaacagacctgcccccccgggcccagccatccccggtccaacaccggctgctcgacccgacgagccctgtgcgccaaacccggcagctaatccagggccaccacccgaaggggaattggcccgcgaggacaagacgggatttgtggatctctgaaagggcagctggatgttgacaaaggcggcgagggcctggatcggaccttcgtactgggcgtggtcgagaaagtatcgcaaacaggactggaagtagggatgccactcgaagatgtcgaactgggcgtcggcaaagggctggacgggaggactgttactaaagttctgagacgaccggcacgaagagggctcgttgtgaggataatagaaggctggagccggcccggagggagaccaaaatacctgttccccttggaagttgtcacctggccgaggcatcgccatggtcggtgttggtttcgttggacgaacggggggtgttcgatgttccaagtccctgaagtggagaactgtgttggtgtcagcagtgttggttgtcaacacacacaattgcacacgaaagccaagagagcaaagcagatggttcagtacccaggagtccaacgtgtctaataacacaattcttgaaaggagacagcctgagcagcgggtggtttgttgatcgtcttcgctctcagacctcttctcgaatgttggaaggatggaagcgtccactgctcgcgtgtgaatctgcactgaaccgtcggcaacaacagcctggtacaggtcggttggaacgttgatcaagcgaggtactgcgctacagctggaaatagatacagcatgaaagattgccaccagggggacacgggggaggtctggggataagatggggggatgatgaattggggcggcaactgcgttagggcgcttgggagggatcctttttatagccgcccgcgcttgaccaaaccttgggacgacgtgcatatgcctgccccgggaaaaatagcaagaaaaaaaaaacgtgttgcgtgagagggcaatgcagcccacaggacaacaacgctcaagagcctgcgaccctgacgaagccaagacagcctgacggcaaggcgaggatgccgctgcagctgagcctagttagctcccggggagagaacagggtccacggtacctggtgcacagctgcgggagattcgtaagatcagtggggatgatgatgatcaacaggatccaagaagctgtcatcgacctacacaccgactctaggcagggggtatgccatgcgcggtacagggcaggaccagcatgaccagcttcgggtccgagggggtcgatgcctgctacagcaatcgatgggcttgtcgtagagcgcgtagacgtatcataggctggtcatggtgtcatccgaagtggtcaattagctgctgatgaccagaagtagtgggagaatcagacaggagaggctcgatgctgccgactttccgtgtcggacttcatcatcggcagccaggcacacccgccaggggcacaaaagacaagacggagaagctgtgggagaagggcgaataaggctagacaggggggggtagcttcgtacctacaacctctgatagagctgctgtttgagagatagtgtaagcaaggtgtgatattggttcacgtataggcacgggagtcggctcttgagtgaataccaagggtagcagccaagggtagcagttttgttaggtggtggtgatatgtcgaggcatgtcgagtcgttggtgggcaatagttgcggacactccatccagaggtctggcggggtggagagttgggatgaggcgcatccagggtccttgggggttgccggtccgggatctggcggccaaatcaagatccagcatggaagccggcaggggcgtcgatgatggcccaggattgtctaggatgtgttggagaaaggctggaaaaagagggctgggcgcgcccgactctctgggccgctgcaaccctctcacccatcccccctgttccgtgcgaagcgggcggcgtctgcttcagcttctgtggctccgaggggctagactagctcgtttgagcaaatgctgcatcttcttttgccgattgcaaaagcgacatgtggtataaatgtgttgttgctgttgttgttgtgagtgggagagcgggagacgggagtggcagcggttccctctttgtcaccccactgtctctggcctgtgtatccaccatctgggcttgagccatgcaagtaacacgccactggcaacttccttctgcgaggttgctcgtgtcatattcaacatgtcggttaggaaaatttcatgaggaaagagcagtctagagaataactggggataggaaagctctacgtcatgactcggcaggtgctactgccgggggctgcctctcgagcctatatttgaagtccctgggccaagagtaacttggaggaatttcaatggtgaaaggctggaagaaacgctccggcagccaagaagatatctgaaatgaaatcgcaaggagggctcctttttggattgatatccgctgggggcaatattggctgtatcatcaccagttcttttcgcacacaagaagtatgacggtcggacaaaatcccttccctccaacaatgtcaagctgaccggggtgaaggtacacagtgcggcgtgggtcggtaccccggacggagcaagtgggaggggtcgcggcaatatggcttggcggcccacactgactttgacttcggcgaccttcaaggttgcttccgctgaggtgtctagacacttcttcttcctcatgatcagcgtccatggttgacgagttgctgaggttccctgatatccaaatcttttcattttggaaagtagctgcagggaccaacaaaatgtgtgcctgtccgagtacgggccgcggtacgacgcagcgcggcagcttgtcaaagcttctccagccttcatggaactgttacaggagagcacgcatattctgttgcagcacctcataccgcctgtgacacctggcctgtgcagcatgtcctgtgcacctacattcttctcatgataacgacgggatgggacgagtttgaaaaggtggcggctccgcggctccggagaattcgtcaacaaccgaatgcaacccccctcttccttcagctacgccagcattcgagccttggagcagaaaggcaggaggagagcaagtattggtgacggtccgttctgagcgataagacagctcggtgtggtgagtttttagtgcacctttgatccgtccgctctgtcaagaccatgtgcatcgttccaagcgtgtggtccggtgtgacagcaggccgagtatcatctgtcgtgcttcgccctcgacccaggagaaattccgacatgcaggtcgacgaaccgccaattgtccaatatgaaccgcttccgctgatgctgtgatggatgtcaatcaaaaaaccaaaaaatgcataacgaacccccgaggtctttcggacacttatctttaccaagcactctccttctcttggggaacacaactttgtcaccgagagatactccgaggtaggctcgattgcggccggcgcacagatacttgggttgcagccgcttgaactttgatatcttcgggacgctctctttttggttcaagaacacacgccgcgtttccaatagcacgcctcggctctctagcatcctaacaacccatatgctcatcaagtgttggtgccatctgagagattctgtgcacgcttcaagacgacaacaaataattacaaaagtatgtcaccggcgcccgcactcgcactgtgggtagtcggcaagcctgcggatcacaccaaaccccaaagggttaggaggaagatcgtgaacctggatcctgggaattaggtgcgcaattaatggcggcttcggcttcagctaccgacgctccgaatctgtagagagcatgtacagctgaaagatacatggcacttgcgcaagttctggtgaagatccgcgtactccggtgaagaggactcatttcagagggcgtggttgaggtctagaccacaacctggaactccctcaactttcctcagcatcttagcccaattccgttctgaatgtatcgcctcgtctgattggtcaggtccacggtgggctactgatgggagaaaagcaacgacgtgccttggcaccacccaccacatggacccttgcatcttgaccttttgcgattcgcaaactgttttgctttctttttttgtttccggatcagaggttgcagacagccatgagagccagaaaccttcaagcatcttgacaaatccgagtccccctcttcagggagatggcacgcttgcttaattcaacccagtcccactcgaacccccaacaccacacacacatgacgtgatgcctcatgcttttttcttcttttcaacttcgggcctctcatcccccttctttccggtcagccagtgcccttccattttctcccatggactagtaggacaccaatcagatgcctcggcgagatccccgacgccatctttatcgaactgatgcacacaggcaatcaagtccaaacagcctcgcggttccggcgccgtcgttttcatggctttcatgggaccggcttttctgtctcgcagagcccttgtctcagctttaccgttgacatgttccaccgtgtttccgtggctctgtcgactgccttgtgtctaatgaaaggggtcggtacacgaattctatcgagggttggcactgacagacgcttgaaataccacgatccccggactttgctgaacccttctgcgatcatactcggtacgagaaaaacaactttccggaaaacaggcgtcatggccgcttcgacaccacaacgctgtgggctcagccttttggggcagctttgcaagtttactccccccccgcagattccactcgttttagttcatcggtttcagcgcttggctaacaggaccatcggaaaattctccccgttttggatctccttgcatcatacctcgagtgtcgtcttcgcgtgcggctcaaggaagcttgtcgaggcaatgccttgaacatgtgcttggcgatgcgtatcgggtcggaagcgtcgatgccctcaccatatcagcaagcgtgctcttggcaagttctggtcacggggagtagcaactctcctgtctagaaacctcagaccgtgctccgatgcgctgcgagttgattcaacgtccaaatcaaagggtccagtgccatcccggcaaccatggtgccccgggtgctcgtggtggtacgtcttgagatatgttgaggcgcacgtcatgcatctcggtcgcaagcagctgacgcttatcgacctcccgccagcatccggtcatctttacggagctgcaagaccatcgcctgcagctacccgtcttcagacaggggctatcccagatctcgggacacgatcaagaacaagctcacccgcggcctgggatcgttagccgttgacaggctcgccctgccgtgctggttcgcattagtggcccccccttgaagagctcttcacctctccccaggacccctaaacccacggtcccacccgaagaagaagtacccagctctttcttagcgaccgtttctggagttgagacaagcagtcccgtggacgtcattccgctgtggcttcccggtgtgattggtttcactggtacctcgacatgctgcagctgtttcttccgaacacatgagtgccttctctctgggtcggccatccctccctctcctcgcttgaatgacgaggctctgtttcgtttcgcagggctcatcagccaagacagacccctggttgggatctttcgtttttcagggtccaaggacaatttcttcactttcccaaggctgtgtcaccgcacacttgttcggtcattttttcccagttcttgcttttggacaccgaacccccggcttgctcacccagggccaaacgcagctggggaccgttcagcccaatcatttcaatcgataggcagcacacgggggagaagctaaaaagctaggtttgcgcgcgttcgatgctgtcacctcttgatcctggccttctagtcgaaaagttcgatcacgatgaacccctatcttctctcgatcgtgaccccccgggagatttatcctctgctgtggcccccaacattcagccgtatggctttgatgcccgttccaagttgatgtcatctccgcctgctgcacgtttcccgagtccgcagtcatcggggtcttcagtctggcatcgatcgataagcatggggaggttcagatactttgcagatcgatcattcataggaaagctgtgttgttcagatcagatatgaccgaatgattctggagaccagttatcgtcatgagatggacattgcaacagccggttacgtcacgacgcggcgggggtttgtgtccgactgtgctgctgtaacaaaaacaacaacaggaacaccgaacagtcataatggtcatatcttggatgcaattccaattcgctatctttccagcgtttatttccttcctgctgcaacaacatctccatgatcttccaacatccctcagctcatcgtctactctcatgtttttgctcaaccaagttgggggagcctttaactgcaatcctgcttggttccgcaagctccctttacgctctggtctcgggcggtgtagagagttcagttgaagccccctcggtccagatatcatactttttaatttttttttatctattatttaatttatatatatatatcttctcatggccatgtttgattagaaatgctagactaattcctatacaagcgatcacttacctatgtgcctgctcaaacaaggcatgctgcgaaaagaagggtctgttcgagtcaaagggtgcttgattaatgtgcttgttggagacatcactttggacgccatgttagcggatgaatctacctagactgaatcatatgtattaatgaaaggccttctcagggtgaacaatacagctcgtctctttggaatcagttaaggggtggatgtctgggcagggttaggccactgcaactcagggttgaacatggagaaagactgcttgaggccctttgatgtaagctcatgagctgaaagtcagtctctctggatggatagagcacagcacagataagatttcctcacattttgtagcccaagcttacgtcaacagatacagagctgccagcagcaaagtgaattccgccaagtgaattatcgtggccggcctcgataggtgcatcttgggagccacccccctgttgatagcgctcggaccagcatttgggagctgtgacgctagggggggttgccactccaaggccagattgcacacatcacttttttacgtgatcgactgtcacactctctgctctgcttgcttccaagcttcttcttggtacttggattttcttcttcattcttctctttctcaacctcgtcaaccccccgtctggagctcggcacacaatggtcaacttcaagtggtcttctcttgctctgctcgctctgcgcgccgccaccgtctttgctcaggacgatgtaagtcccaatggttccgtcatcgcgccacctcacctcgacagctcgagctccccgtctagcttcaccgtcgcgcaaaactatcaactggcatcgcagcttcgagatttgcaaaggctaacgtagcatcaacctccaggccgacgctgagcccaatgtttcgactgccaccgagaccccagagctcaaggccgatatcgaaaccaccttccccgactctgatatctttggtgtgaagctcgtcaacaaccgcatcaacaaggccctcattcagatcaccaacaatgaggcgactccaattgacgttgtctacatcggcggtgctttcaagaccacccagcccctccccgaggatgctcctgcctggggcgccattatccgcaacttgaccgctgtcaaggtcgaggcctcgattcctcctggtggcaagcaccagatccctttccagttcactcaggatatgaacccccaggatgtcattcttgacctcatggcggtcattacccacgccgagtccggtcacgtctaccaggttctcgcccactccggtcccgccaccattgttgagccccctaccagcatcttcgaccctcagatgtatgtgttttcgacatgagcctgaccgatgatggttactaactcttctccagcatcttcctctacctcttcctcaccggtctcttcggcgccaccctctacttcgtctacaagacctggatcgaggccctcttcccccaaacccgccgcgttcccgccgtcaagggcaagaaggttaagaaggttgaggttgagcccctctctggctccgagtcggccggtgccaccagcactggtgctgacaaggactacgatgaggcctggatccccacccaccacatcaaccgccccgtcgccaagcgcgtcaagagcagtgccagcggcaaggccaaataaattggaannnnnnnnnnnnnnnnnnnnnnnnnnnnnnnnnnnnnnnnnnnnnnnnnnnnnnnnnnnnnnnnnnnnnnnnnnnnnnnnnnnnnnnnnnnnnnnnnnnncaccgctttcatttctgtaggataccagccagacagttgagcccatcaatgggtggcattcaacgcgtcaaagattgcgaaaaacatcatgcgacgtccaattcacaacagcgatcaattgattcacatacaaaaatcgcaaaaaatcgcaaaaaatcgcaaaaaaaaaagaaaagaaaaaaagaccaaaagataacggacttcccaaacgccccgcggaattgttttgatgtttgggttaaaaactggacaggttgtacgcggtagtgggagttttccggatggggcgggcactgatctgatttctgggtagggaagggggggatgggtgggggggggggcggcagggcaagtgctgtgtgattttaccggctgatttaattccccaatttaattctcattttcttttttttggggttttatttttattttttcttctttgtttttattttttattttttattttcttctgcatctgtcctttctttctcccatttacaaacaaaaaccaaactgcaaaaaaaaaccatttttctctcctgaggaattttacttgctcaatttattgcgcaattgtttgaaaaacgcgcgccgatttgaactagacaggacaacaaaaaacaaccaagcagcagctaccaccccaccagaacaacaaaatggcatccaccgccccagacagcggcgccacccccgtcaagcgcggccgcggccgcccccccaagccggagcacgagaagaagccgaagccggtgcctagcgggcgtgggaggggaaggcccaaggggagtggtggtggtgtgaagaagagtgctgcggcgacgccgaagaagacggagacgacggctagggcgaaggctatgaaggcgaatgctgataaggtggaggctgaggctgaggcggcgaaggttaaggctggtaatgctgggggtacagggaagaagagagggcggccgtcggggggagcggctacggttaagaagacggagagtgttaagaggggggggccgaaggtagggggaagaagaaggaggttagtgtggaggcggaggaggaggaggaggaggaggcggggggggatgagggaggggagggggagggcgaggagagttcttaggaggactggaaaggactggagagtggtgaggatggggaggaggaggacgaggaggacgaggaggacgaggagatggaggattagggagggggattcgtctcttttgtatggtgtgggttattggggtggggttaggcgtgtgaaagtgcgtaatggagtgtacttatctgctagggaagtgtcgtgtttttgggggagatcaaaggcttttcattaattgatatatattttacccagcgattgtcatgtcgatgtctaccgcaatctgtgctggaggggatgcttgatggtgcttctcgatacgcaaaatatatatgcagctaccccgaatgctactatccgtggtgatcccgcgcaaaaggcccaagcgcttctcttgaacctctgccaagcaatactctgctcaaccctgttaagcctcaggggaggggcatccaatcactccctcgccgtcaaaccttttgctttgctcatttcttcgataatcctttgcgccctttcaggagaatttccctcttactttctagggagctctcatacgactatggagagctgcgcacgacgactgatttcattccgggggtctttattcgacacgacgtgagaaaaaacaaaattcacacctttctttgcactgattcattcagcctgtttttttttttttttttttttttaaagaaacaaccaacaacaactctctccatcaacaatccacatcaacaatccacatcaccatcagttttcatttatcaacaacagcatcaaaatggccaaacacaagaaaacacccgccccagccccaccaccaccggcagcatcatccgctgggaagagctcgtcatccagcgggaaaaaagacaccaagaagaaacccccagcagccgaagacgacagtttcatcgtcttcaccaactcagacaaggaccccaagcgccgcacaggtggtggtcccagcaaaggcggtccttcctccgctggtcagcaacaagaaagtattgactctggccccccaaaaccaacagtcaagcaaatcatcggcggcgcttcctggacgggaaaactaccagtcaatctcctctctgagcactgccaacgccagaaatgggatcgtccagagtacaacaccatgaagaccaaggatgggttttcggttatcgtctctttatctgctcgcaacccgaaaacgcaagaagtgacgaaattgccgccttttaaactgccgcctagtcatgtccatttggcgattaaaccgactgcgttggaggcgaagcatttcgcggcgacgtatgcgctttttagggtttgtagtatgaagaatattcatatgacgctgccgccggatcatagggggtattggaaggagttggagcagttgaagagggaggatgtgaaggnnnnnnnnnnnnnnnnnnnnnnnnnnnnnnnnnnnnnnnnnnnnnnnnnnnnnnnnnnnnnnnnnnnnnnnnnnnnnnnnnnnnnnnnnnnnnnnnnnnnnnnnnnnnnnnnnnnnnnnnnnnnnnnnnnnnnnnnnnnnnnnnnnnnnnagggggtggatgtatgagggtgatccgttccaggccttgagggagagggaggaggcgaagagggtggcggtgaagaagagggcgcaggttcaggctgcgagggagaagcagctgcaggagcaggcgagctttgggggggtactgatgaggggaccgggtggggggtcgggagcgggagcgggaggaggaggtggtgggggggcgagtaatttgatgagggggtgggctacggtgcccaagattgagatgggtgggaagactaggacgcagctggaggagattttgaggagggagacggtgtggaatccgcatggggtggtgatgacggagaggcagaagggggagattgtgagggagttgaaggggctggggtttaggcagagccatgtggaggaggcggtggaggagtgtaaggatcgggaggagacgttggagtggttgttggtgcatattccggaggatgatttgcctaggtgggcgctgccggagaagtatagcgcgggagttacggttgctgcgacggatttgaggagggagggggcgatcaagcggttggcggagtcggggtattcggttgatttggtgaggaagatctatgatgccaatgggggtgatgaggggaaggctcttgcgctctgcaggagttgctcttggcgagcgggagtggtgagcaggaaaaggcgcaggaggaagagcttgatacctggagggactcggatgagtgctgggaggaggagatggctactctcgaggcgagctttggtgatctctactcgagcagctcgcctgaggtgtgcaagattcgactggagggggttgttaacgggactcacaaggatgtggagacatacttgcagttccgaaagtcgcccgagtatcctgcgcaggtcatcttggccatcgaggcccagcttccggcgtacatcaagttgagcatcatcaagaaggcgttggcgtatgcgagggaatcactgcagggcgaggagaccaagatttattttatcgtggattggatccagcagaatatcaacgagattatcgagaagccaggcgctttgagagatgttgcggcagtggcatcggctgcctcagaagtaccaagaccggtggtcaagtcatcacggaagcggcaacggtacccgaagcccatcaattggacaccaaacccgcagagcaagcaggagtggttggcccggacagaggctcccaactacaagaagatggcggcgcagagagaaagactgccggcttggcaagtcaggcagagagttgtccagactgttcagcagaaccaagtcaccatcatttctggagagacgggttccggaaagtctacgcagtctgttcagttcgttctggatgacctgtacgatcggggtcttggggggagtgccaacattatcgtcacccagccccgtcgtatctctgctctcggtcttgccgaccgtgtggctgaggagagatgtactcaggttgggcaggaggtcggtttctcgattcgtggcgagcacaagacaagcccgagtaccaagatcacttttgtgaccactggtgtgttgctcagaagattgcaaacttctggtggcagggttgaagatgtggtggcatctctggctgacgtcagtcacatcgttatcgatgaagtccacgagcgtagcttggacacggacttcttgttgagcattgttcgcgatgttctttacaaacggagagatctcaagcttatcctcatgagcgccactcttgacgcgtcttcgtttagggattacttcatggtagacaagcagaacgtcacggtcggtctggtcgagatcgcgggccgcacatatcctgtcaatgacttctacctagacgacatcatccgtatcactggcttcagtggtggaaatctcggtggtaggaacgactactacgacgacagcgcaaaccaagcgtctggcagagatgtcgaccccgtcaacaagattatccagagactgggacaccggatcaactatgacctgcttgctgatgttgtcaaggcaatcgatgaggagctgtcaagcttgcagaaggccggtggtatcttgatcttcttgcccggcgtggcagagatcaacagagcgtgcaacgtcctgcgatcagtcagctctcttcacgtcttgcagcttcatgcctcgttggagaccaaggagcaaaagaaggtgttcttgtcaccgccacctggcaagagaaagattgtcgtcgccaccaacgttgctgagacgtccatcaccatcgacgacatcgttgccgttatcgacagtggtcgtgtcaaggagacgtcatttgacccccagaacaacatgcggaagctggaagagacttgggcttctcgggcagcttgcaagcagcgccgtggccgtgccggtcgtgtgcaagagggcaactgctacaagctctacacacgaaaccttgagcagcagatggctgagcggcctgagcctgagatcaggagagttcctcttgagcaactgtgcctggctgtgagagcgatgggtatccgtgatgtcagccatttcttgtctcgggcgccgacgccccctgaggtgacagcggtcgaggcggctatcaatatgcttcgtcggatgggcgctctggatggcgatgagctgacggctcttggtcaacaactgtccttgatcccagctgatctgaggtgcggtaagctcatggtttatggttcgatcttcggctgcctcgacgactgtgtcagcattgccgccatcctcagcaccaaaagtcccttcttgtcgccgccagacaagcgtgaggaggccaaacaggccaaaatgcgcttcgctagaggcgacggtgacctgctcactgacctccgcgcctaccaagaattcgacgccatgatgtcggatcgcgtgcctcagcaccgcatccgccaattctgctccgagaacttcttatcgtatcccaccatgtcagacatctcttccacccgcacccagttttactccagcttgaccgagatggggatcattccccgttggtataaccctcaagcctcacagcaacaacagcagcagtcgatggtcctccttcgtgcgttgacagcctctgcattttccccacaaatctgccgcattcagttccccgacaagaagtttgctgcttccatggctggtgcggtggagttggatcccgaagcaaagacgatcaagtactttgctcaggagagcgggagggtgtttatccaccccagcagcacgctgtttgactcgcaggggttttcggggcacgcgagctttgtgtcgtatttcagcatgatttcgacgagcaagatttttgtcagggatttgacgcgtaagtttgtcctgttctttttgaagtggttgacatggtgggctaacaaaaaaataaaaaaaataaaaatagcattcaacgcttacaccctcctcctcttttctggcgccattgaactcgacacgcagggtcgtggcctggtggtggacggttggttgagactgagaggctgggcgagaatcggtgtcttggtgtcgaggctgaggggcgtgatcgataagctgatcgagacaaaggtcgagaacccgggtgtggactttgacaagcagaagcaggatgtgatcaggttggtggtgaagatgattgagttggacgggatggatgcttagatgggattagataaaatggggtagaatagagaatggatggatgatttacgaacactgttgggctgtcccaggtggtcgtggtggtagatgcagcttggttattatcgacagcaagagaggtgacactggaaggagcaaagaaaccatggttcatatattaggtcaacctcacagcttccaacaccaacttcaatattcttctaccagggcgcccttgtggtcagcacaaatggttaaggatgtgggagcttgctgttactgcgccccccccacccaagccgcgagcttgcaaccgatagctcccgagttcgattccggagtaaaacccaccctaataggttttcgtagccggccacctctttcagacactggtctgggcgggttggccagtgagctttttggggtgtctaacatgagttaacctatattatattgtgagttatgcctttaggagtaaagtaataggccggtgtacgagcaacatcacgacgggcatcgtttcatcccaacactccaccgacaaaatgtgccagatcacgctcatccacaccacccctgcggtcacgtcatgcccctggtggcctgttgccggggtgccactcttgttccgcttgacaaccacaccttcgcgtacagttactgtccctacttcacttacgatgaagatttcgagaacttcaagtgtccttcaagttgttattgccgggttgagggacgggatagtgcgcggtggggggttaatttggagaggttcaaggcagcctcgaggccggacctgaggagactcgagtccccatccttgagcggttatgcgagggctgggagagggcatgaggatatggttttgcagtttttgagcgagaaatgagtatagcgtagcggcattggtttctgtttccgtccaacctctgagattcaccccgaacttttgctcttgacgaccagaccaaatggaagtgaatcgttgcgcctcgcctcaagtgaaagaccatgctcctcttgaggtgaatagatgacgagtggttcttctcgtcccagaggaagttatacaaacagcttcctttcagtctgcaaactctttccttttcctctctcgatatccatcagatacatcaacgggatcatcagtcaggtacatcttctcgctacatttagcttcatcactcaaccagttccacgcctcacccaccacacaccaatcatccacctcgagacaagatgtgcgagaacagaatctgctactacgcctgcggccataccgacatggacgtggtctactgcagtgctgccaaggctgtcgcgcctggttcggcccttcgcgtttgctgcgtgaacgtcacttgatagctgcctcaaaagagaatgtgaaccgtgctgctgtcaacctctgtgttgcttgcaattcagctacttatcaaacgtaaagaaatagttaaaaagcctcagaagatagtcaagagacattaaaacatggttcaaaggctcttgaaataatttaatggccttgcaagataatttaaaggcttattaattttctttcatggccttttaccacttaggtactcaagccctggaggttattttgatctgttggcgtacaacctctcaagcatgtgctgtgttgactttgtcaaggcacacgaactggcaacccgtggagcattttggggatctcactcggcctcggagcaacgtcgtcgaccattccaccccggtgtcaacaccatgtgcctattcaccacgatctctcacactctccctcatcatccccagacaatcagcagagtcggcacaaacgcttctttctttccgcatttccgacagagactctcatcagcccttcctcaccatcacatctatcaatcttcaaacaagacgtgtgagactcgagataccaactacggctgcggtcacacgcacgctaccaccatctactgcgagaaattccgaacccattcccggaagctcacttcgccacttctgcgatgaggtcaaccacagggagagagatttcacggatcagaagtgtttgtcgaaagattgccagtgggagggtcccgatggtctggtgtctttccctgcttttgagcgcccccagacgatacgctcatagcaaggaagagcagcatttcttccaacaaatgagctgccgacgacagagcttcacacaagagatacgacataaaatggaagctagtttacgaccgaggagagagaacgcgaaaaatgctggatcatcagcagcagaaggacaggaagaaggactcaaagacatcgtccccctaccacaccacctggcactacaacagtactttcccatcacatattaccttgggccctaatcaccccatttccctcaagcgataccccgatcccctttcacttaatagcaccatttctctcacctatcccccaaaagatccgagcaatgctctaataaagaaccaattttcttcatacatttttgtctcttctctatgagtgaacgttgcctgctgactaagcacatcatcccacctctcaaaaaagggggtcacagcaccatttcgtctctcatctccacttcaccaaacaaaggagttcaccactcacccgttcacttaccagcagccgccaccaaaaatgacaacccccctccctcccctcccaggcaattacgccacagcccttaacctcatcgatgcagcccacgcccaagacccccggcccggccccaacgacgtcccctacgagctgcactacgcccagaaaatgactcgctggctggccaggcggaaaaaggatgcgtcgcccgccctgcagctggcctgtcgagcgcagcattttcgacggtatatccccccctttccccctcataaacactaaactgatgatgtgaaataaagctgggaaatcccccgctcaacctaccccatgacccggccgggctacctcacctggcgggcaaaacaaaagtctgtcgctgccacccagctcaccgagctcctgtcctcagacgagatccagcctgggctggacaaagaagagattgagcgtgtagctgcgctggtgaggaaagaagacctcaaaaataacgaggagacgcaggtgctggaggacgtggcctgcttggtgtttttggacgaccagtttgatgatttcgagagcaagcctgagattgacgaggacaagataatcagcattctgcaaaagacgtggggaaagatgagcgaggaggggagggggttggcgttggggatggagttgagtgagagggccaagatgttggtcgggagggcgcttgcttagaactgataatgataaagcatgagagaatcggtgtgtgtgatgtgtgttttggtggtgtcgggtgtcggacccgcggtgctcgggggtctttgtcccgaagatcggtaacttcggccgagaaaagtgacgtcgcttcgggtcggcggtggatgatatccccggtgtaagcccggactcttcacctcctcgctcaacaaccaacatcggtcccatcttcatcacaaagtaaacaccaaaaaaataaataaaaataaaaaaatgtcccgcaagatatccccagcagaactatcccaacataattcccccagttccctctggctagcaatcaacggcctagtctacgacctcaccgccttcgccccctcccacccgggcggtctccaaatcctccttcaacatgccggccaagacgcctcagtcccctacaacaaagtgcactcgccctccctaatccggacttcccttcctccaacagcacaaatcggatcatctgactcgatccaaacccccgttccccagatattctcatctgtgcccaccaagcccccattatcaaccttgatctccccccatgacttccccctcgccgccatcccctccctcaccccaaaggcaaccgcattcatctcctccgccgcaaccgactgcctcacccaccgcgccaactcctccctctactcccacctcaccctccgcccccgcatcctgatcaacgtctccaccccgaccacccccctcgtcaccaccatcctcaactgccccgtctcatcacccatatttatctcccccacctccctggggaaaataatccacccgtctggtgaaaaggccatagcactggcttgttccaacctcgacatggcccaaacaatcagcacgtctgcatccttcaccctgtcggagattttatctgggcaaaatacctctcacccggcgtttctgcagttgtatgttgataaaaacagggttaattctgagagggtgattgaagaggcggtgaggaatggggtcagggcggtgatggtcacggttgatgcgccggtgcctgggaagcgggaggctgatgaacggatccccactgctgctgggggggagagactggctccgatggcggggacggcagctgctgttggggacgggaaaggggcggcgttggggagggtgatgggggggtatattgatgattcgttttcgtgggaggatttggggtgggtgaagggcttgttgccggagggggttaagcttgtgttgaagggggtgcagactgcggctgatgcggtgagggcgatggagacggggttggtggatgggattgtctatttccaaccatggagggaggagtcttgagactgccaccgggacgattttggtgctgttggagctgcagaggtgttgtccgggggtgtttgacaggatggaggtgttgattgatgggggggtgaggagggggacggatgtgttcaaggcgttgtgtttgggggcgaggggggtgggctttgggagggcccccctgtgggccttggggctctatgggagggagggggtggagaggtatttggagattttgaacgatgagctggtgacgacgatgaagatgtgtggggtgacgagtttggaggagttgcacccggggttggtgaacacgagggcggtcgatcatttggtgccggagagggtgggtgaggagcatccctatgcgaagtggaggaggaagagtaagttgtgaggcgcgaggtggattgtgtgagtggcggtgggcggtgaccacgggaggtcgagctgatgttatgggccgactgagcgaacatgaggagaagaggcgggacaccaagagacaaaaccacggtatatataccaccttcctcacccaccttccaacagcagccctgtaatcttgaccagggcgccacacttcgtggtcaggacaaatggtcaaggtggaggggctgctgttaccttcccccgccgggagcttgcaacaccgatagctcctgagttcgattcgaagtaaaaccaccggagtttttgtagccggccacctctcccagacacgtgtctgggtgggatggcccggtaagcttttgccctttttcttttcttttctttttcttctttttttttcttcttttttttcttctttttttttcttcttttttttcttctttttttttcattatcttaatatctggtatttttgctattacccagttgaagacctctgctgttttgtttttgacctttttgaggtgcaggagttgtgggagtctcgagtgttttgtttaccatgacttgcgactcgacctcgagcttctcaactcaacgtgtcttgctcgcactgttacatgtccaccaaacaaacctacaaaacccacatcaagtcaggtaaacatcgtctgaaagcattatcctacataccacttgaaaccacaagcgcaaacaagcaatgagaacaactcacaggaatcatatcctaggcattaccctaaccctattcccatcctccgccacccctgacaacagcaaaacaaaagtcaacaaaacaaaccccctattcccacaaccatcacaactcctcctccccatcctcaacagtagcctgataacaacccttatcacacccacctccttccacctcagcctcatcaacatccatccccccatccaaccccccaaaaccccacgtctgcccaccttgcaccgtctcagtaaaataatcctgccccttctccctccccttccctttatccctcttccccctcgtcccctcccccacctgttccctctccctctctttccccttacccttaaccttcctactctgttccccaacctcctcccccgtcctcttcttccgtctcgaaatctgctgcaaccgagcataatccccctcatccaactccatcttcacctcctccccttgatcctccacgtcataccctccctccccaaactccccctccggatccctcaccctaacaacatcacaatgccgcctccacacccgttcggcaaacccaaaagaggccttttcctcccgtctcatcatctcttctctcttcttccgatctttttccttttccttgtggtggtgggaagaggttgctgtgaggatagcgtagtcggctaggtaccccactgggggtgtgtatgctggggcgccggacatcattttgtcgtattcacctattgtcatgacgcagggtttggtggattgggattttaggcgggaggtgaggtaggtttggaggggggaggtggtggtggtggttgtttcgtgggttggtggtggtggtggtggcgggttagggtgaggaagaggggtagattgattaggttgcgggaatgggcctgacacgttgttgtctggatttgtccatggatcacacgccggttcagggggcggtcgaatcccctgtgtgaaccaattaacccagtactcttcgtccccttccgtgtcccgcacgccggcaggtcgaaactcagacgacggcatcgtcaatccgatggatccggtcttccaaaaccaggagctcagtgctgaaggctgctgatctgacatcagaggctgaagagtcgcggtttgacgaacctcctcctgctgtggataatattgctggtaaccaccctgatactgcccctgtgcctccaacaacgactgcggtcctgccaacagttaacaccaccccagaacccatatcagcattcccgaaactcacctctacccccctccctacacccctcacacctcccatgcccacaagcaacctcataaacaatctgccctctccccacaatctgccccccacagtaccgcccatcccgattcctaaagtcgcactgacagcacatccacgctattaccataatggtcggtaacaccacagcagcaagctgacaacagcttgccagcagcaaaaaaaaaaatccaaatcagaaacaaaaaggagtaaagagttaaccaaaaaaaagaaatgatcagatcaaaagagaagaagaaaacggccgagagcccttttatacacacacacacacacacacgcacgcacacacaacactcgcactgcgctggctaccagcagcatcatgctgtgtcttcccgagtcaactgtgcgcccccgtggtcccctgtgtcacccttgacacaaacaccaacaacacgggaggctgcacacaggggcgcctgtcacgtacaaccaaccggccgcaggaccatgacacgtttgaggtttagagctatccattgggaaaatgatttggtcttggaaatactcgacaggcttaagataattgcttagtgacgctgatcaaccgtggtgaggccttgaaaagaaatatccacgcttccagaaatgtaccaagccctccaatccagtgtatgaaaacggcctcaaaaaacataggcagtgccttgaaacataaagacgaggcgtcagaaagcatcgagtaagccttggaagagagtgaacgatgctccaagaggcagttgattgaccgccagtgttgttggattcgtcattgccgtcagatccttgcttgtcgttggatccgccattaccatcatccttgacagcagctggagacgcagccggggctggagacgagccgtaggagcacgcaggagacgggccccgattgccattggtaggtgcaccgctaccgccgttgataccgctgtcggtgccgccgggaggtgcagtggcatccacaaccgcagtcatgggtgtctcttgggcgggaggctgcgggggcaccaagatgggttgaacaacaggcacagacacagggccatgttgttccagaccaagtgcaggatcggttatcgaaaaatcggcaatgccatcacggaggccgtcggggtagtggaacggagggcttctggggaagaaccccggttcctcatggggaaattcgacgtcgtggtaacctcccattgctattgtctgtcagctcccgaaaggtgaaagtaacgaaagagcaacatgcgcagctcgggatcttgcgtgcaatccttgcagcatctgtggtgacctcgggttcctctcccactgcaggtatcattcgtgcatctaccgccctcttcgatttctgtcccgcatttgcaggaagaccatggcctgccctggcagtaacaatcccggtatacgcatggctgggaggaatagagtgttggtgcagagctggcggcggtccagggatcggtcgcctctgcctcgctgcagagttgggttcgggaccggccctgggatgggcaggctgagcagaggctgcgtgcggagctgaaggagtggcaggagtggacgatggagtgtctgaagcacatgttgagggggtctacaagaagatggaacgtaagtggttgtggtagatggatggcttggtgtttagaatgggtgaaaagtccatcctcgaactgggtcgtcctcaaaaagtgcatttgggattcaatgtgtgctagagaaaggtacagttgagttgaggaggaaagatcaaggcagcgtccacttggacgacaggcggagtggacctagccctgggaggctctatctttgcttgagatctcaaggtttcttaagacatttagtcagtgttgaaacgagatcagcggcactggctagtcatcgcggtccattcagtgcatctgcagcacatccatggtcttccctgataacggcaagaactgccgcatataatctgagtggcatctgctgctggatgggcgttgccgaaggacaagcattgggtctgacgtagggacattcacaggggcgaatctctaagtgacaactgcgcatcttcgcagagctgcggaaagtatgaaggttcttgatagagtggcgaaaaacgggccaacttgaagagttgcgagataggtaaggtggttggatgagtgttgttgctgatgggaagctggcaagagtacatgctaagctggggaaatcactggcagtccttaaatatctacactgaagaacatactggcagcaattggttctgtcacatggagactgatgtcaaagtctggatctcgcggctgtagtttccttgtgtattcagtttcatgcttcatattcttgccccttttcctgtttgcttccacgtcacaaaagcatcaagagttctctgctgcagccagagaggttcttcatcatacctcaatgtaccagtataactgccttgtcatggccatcatcaactcctccacttgctctccatcaccatcaccgtcttcatcttctttccatggcaccagcatctgcaagcgagcaacactcaagcagcccaccctccacagccttcaccagttctcatcgattccaaagtcttatcgcagatcacaatgtccggagctaaaggaggatggtactgccctacttgcaacttcctttgggattcgagcatacaaagatgccacgacgacggatgtcgcggccagccaccgcttcaacattctccccaggctgtgcattatcctgcgcctgcacaagcccagaacccagctggctacaatgctgttgctcagcagcagcagcaggcataccaacaggcgcagacgcaggcgtatgcaccccagcaacagcagggacagcagcttcaacgcgcgcaccagtgctatgccccacagcccggtcaacaatactacgccccaggatattcacaagcccagtcgagccagcaggcttgtgcgggcgggggtttactactatcagcagcagaatcccgctgcgcagtcaggagctcaggcgtatgtcgctggacaaggttatcctggaccaggttatcctgggcagcaacaaccgcaacagccacagcagcagcagcaaaatcgagtgcttccgccccctcaaagtgactgggtcttggatcccgttagtcgacgctggcgtccgccgaatagctttggcggacatggcggccaagggggacagagccagtgatgggtttcatttccattgctagtttgcttgtgcctgtgatctttattgtttagagtcttttaatatctagtttatgctgcctggttgtacttttgttggtttgttttacattcccatagccccttttttgtgggtccctctctctactcagggggtgatttttggggggttgttgctgggcagtgcgaactgcacaatagaaagctgttcaaggtactttccaaatggaggttgaatgaagggtagtaaacagtagtgtagaataactgatcgtgatccttcgggtctgtttgctttttggccgcttggccaggtcaaagcttgccagcagagatatattcgaagaaaatactacagcgtgtctcttttattgatttgatgaccccgctgtgttcttgtccacatgacgaggtgaaaaattcgaatcctgataccatgtttgccactagtgctcatctgaagccatgccgtgaggcttgtttgcagacataagagaggcgctatcagatgacattctcaagcttcctcggtctatttctcatccgattttgttgagcttttacggctaagttggaggatttagttgggctggagagggtgttttcttttggcggggggggcgatagatttcttttgtctggtgggattgggatgctcctttttttggtaggacttgttttgactggccggccagttttgtttacatcaccccttttttctgctgagcggaatttcaggggtgatttcggtgagttgtcggcagggtgatggtgatttgtgcaggctgctggacagatgaggaggcaataaagagtacagggattagagcattgagtgcacaccgtcttatgattataggcctatcagtacttattgctttgtgttgtgtgacgacggcgatgtcagctctaatgacctagctcccaaatgcttaattttgtcagccgctttctcttatctctaaatttcaagggctcataaggttatagttatgcgttgatgtacatcaaggttatgtcgtggttgtgaaagcaccgagtgttatcttcaagtacgagttccaaacttccccatgagtagacaaagacatctttctggccagtcggtcctccctcatagagattagatctattcaggcttactttcatcacaatgttataggcaagcttgaagttgacaaagtttcccttccaacttaacaaccctacaagactccacttgttgatcccttgtctctcgtgctaccctcgtggcttgcggtatttctggtggttcaaggtcattctgtcgccgatgttcagatgctaagtcatttcaagccatcagactggattgctatgtcatgctattacaccaaatggtccgattaccaatttcactcgtttgctttgtttcaggaggtaaggtgacgtggttattgtcttcagacggtgtagcctcagtggctcactcttccaacatccgatattcttcttatatttgtggctataagaggcccattcggcagcctctctgtaatctacatcattgtatccaacagccgtcttcagaatcacccaactttcatgatcccgtcatcttcgcatgttcgtcgaggtctcggtcgttgttggttcgagtacacccctaaaagtctttctacgacggctgttagccatgcccaactgaacttgtgtttctttctggactgatagaggttttgttgatgaagatgtcgtggactggctgttgggtaatcccttagtccagtgaacttcaaaagcaaagaaccgccaacaacaatcagaagaaccaccaacaacaaccagtgatcatttcagaaacagggaggactggcacacgcgttgataaagggagcaaacacccttgtcccttgacaccattcttcatgtgggtgttgttgctgttagtggcttgatatttgtggtggacgccactgatgcttggcttcaggtgggtggaagaggatcgggtgactataccgagttgtcaacgggtgtggtgtgtcgaattcatgttcagcagggtcgtttaggcctttggtggatctttcatgaggtgtactgattactggggagcaactccaaagcctcccatgacaaacctcgatcacaaaatcaacacatccaaaaacacaaacaaatccactcgaatcaacatcaatatgtcaaatctaccataaatacaccctcccccttccctccacccatcccctccttcaacaccaacacacaaatttcccccataaataccaaaaaacccaaattacaaccgacaagacaacaaaactccaaacacacacacagacacatacccacacacaccaccatcagacagacagaatagtatcaacaccaaaagacaaccgtcgcctgagttcgacgtatcgggtatcatcgaccaacagtagaaagacaagaggagcatacaaataatgccagaaaaaaaaacacaataaacattaaaagcagaaaaaagattccactgcaaaactcctttttgacccgtccacccttccttccctcttaaccccccacccttcccggaaaacgtatgtacagtatatgcatacaaagatgattgcgagaaacgagaagcatgtcccagtttgatgccggaaatttgcgcggaaaatcaccgagtatataagggttgtattattttcgaactggggttgtagtattcgaacaagtagaaaaccgtgatcgtctttcgaagtctccgttatatcatccctggtggcgcgcttggctcgccctgctctgtcctcgctggcggctgcgagcccgtgcttgatgctgggttcttgttgctcgaattaagccctcgtttcatcatcttccccaaaacggtcactagttcacaggcatcgttgaacatgtcgttgtcgattccttccgtggcgtcatagacctgggcgactgtctccttggccaattttcgacttccttcgaaatcgtggacacattcgtataaaaaggcagcatactctgtcttgacggacaggcgtaatgaatgtgagccccacaagatcttgtcggcaagttcggcagcctccttgaagtactgatgggctattggtaaataatcgccgggcttgagaaggaacgctgatggtgactcaggaccaaagcctggtggtggcccaaccggtcctccttcaaaatttcggcttggttttgcgcttgatggagcaccgccgtcatccgccgcgactcccttgcccttgtccagtcgtgattgtggtgtattctgggggtcgggtgtgttgacgcccatcgaagataccgggggcgtgttgtggaataggacgaaaatgtggtagaaggaagcacgcagcttgtatgcgagcaccttgagttcggtataggctcccaccatgggcaccacatactgctccagcaacaccaatccttctcgagagagccatattatgtgaaatgacagatccagttgggctgatgtgggggttccatccggccgtcgttgtttcttggccttgacaagctgatgtgaaaggttgatggagagtcccaggatcttgtacaggacggaagcaagcagggggttttcgtgctcgacggccttggcggccttgccgagaaacttttgatcaacttcggaggacgccatgaagccagacggaggagaatgggtctgtgacctcttgccctgttaagagaacgcaaagcagaggaagagcccggctacggtgaagctatgcaatgggttggtgcaaccgaggtgtaaagaacaagtaatgcagggccggtcctataagaaaaccgagagtgcgggtgactggtggttgcttggggctgatcgtattctgcatcaaaagtcgaaaagcatccgaaacgggaggggctacttggtctgtgtttagtatagtcaaagaggctcttgatccggcctcgccgtggagccacaatcaagcgccacgagccgcagtccgaggaatggctccgttttaattacagaaaggactgtaaagttggcatgagaatcgggtgtcggatgttgagcatgacgattggaggagtactgaccaatatgatacagcgaaagcgggcagcctcccaaagcgcaatttgtacaagttgaacagcgaatcggcagcctcgtgaaacaggcaagacaatccgtcgttaggagcgagaggacaggaggaagagtcgaggctgggagtcagaggcggtggtggtgagtgtgcggtttgcgagactgggcatggcgacgacgtccgggtctcgatggcatgtgtcgtttacccgcaatggcagatgtcaaatcctccccaggttctgcagctgcggcagcgggagcgggagagaccgcagcagatccagcagcaacgagcggcagcagcacaaacgcagacgccgttggacgttgaggggatccccgtatcggtggaccaggggcagagcggtcaaaccggcgacccagaactggcgatgacggccccgtaaaatcaaggcgagagcacacttgggggctggggaggtcgaggtgccagatgtggagtgtctttgaaacccctggagccgtgataagtggtagcgtcgcttcagatggccagctccgggagccaagtcgagaacgggagccgcggtggagtcaagggccgggcgcggcggaagtcgaagtgaggtcaagaagctgaagttcacgatgggatttgaggtcgcagacgaggtgaaaggtgaaaataccaggtcggctgcgggctcatgcagggtgaggtcgggaaagtaaacaaggggggttttgagccccgcgtaagcaggatttcgaatgtgagtgtgggcggcggcaatctagccaagagtggacgagggcaaaagcgcaagatgcataaccgggggttgggatcttgtcttgtttcttgtgccttgtgttttgtctcttgtctcctcttgttctcgaagcgctggagcaaaagagaggaaggtaggagcagcagcagcagcagcagcagcagcagcagcagcagcagcagcagcagcagcagcaaggaacaacgagggtccagtctcctgcatgaacgagtggacctgccttggacgcgatgcgatgcgatggcggcttgcttcgatgggatgacgcagatgcagacgcaccgacagctgcaacgtcagggcagggaagaaaaaagagcgacttgggacgaaggggggcccttcaaatgagcgactgatgaacgagagaggaaaaggagggaaagggagagaaggcagagagagcagcaggcccaaatgagtgacggacaaggcgtggttcgagatgcaggatgtttctgcaaggtgagttgtccaccgcctcctctctgatgatacgctgatacggcgaccagaagacgcgctgctgctgggccctgggtccttagacgcggttctgtgggggggaggaatacggtcggagagccgcaggcgccggcaatcaagcgccggtcgtgtatcaggagccttcaatggcaaaaagaacggacgacacacggacgagatccgaagtcgaaaaaaagacggcggtgatttgactggtaccgaacatatcaaacagcaagatcgaaggcgggggcaaggggttatgagggttggtgtcccttgggggtagtttctgttagtatcacctgcaaatctcctgccattcactaacatatctgcattgtttcataattcccaccacccaaaagcggctgagtgagacagagcgacgtcccgattttcattgtgtctcgggaaccacgttctcgtcgaatatttttattctcaagtaacattggcctcacacgattggtcttcggttgcacatacacctcgtgctcgtcttcgttttacactacaaccaggattcaacatctcgaactggactggtgatgtaatcacaggatcccttccccgcaatcatggcagcatcgatggcatactcgtctctgctcaattgagcacaagacagatatcaaatcaatcaattggactcccagccacctccattttttctgacgacaacaacaacaacaacaacacacaaaatcaacgcggtccagcaaccagcatcgaaaaaagaagagccaagacctggcctgggcatctgcggccacccctcactgctcaccacctaccactcaatggccagcatcgccatctttacacaacagcatggtactcctgacagctcagcgctggctcccgctggcctcgaaatcgcccgtctccgcaccactttcgtttgcctcatcagaagaaactggcggtgaagatggatcaggcccctcgctcaacctccatggaccacggcccgactggaattggtatccaaaacagcatctttaatcagctccagctccaacagtagctgataaccggtcgtccatcagggacaccctcggtttatcgaccgtcgttcggcccccaaccacacccaacacgagccgcacccgttttgggacgctcagcagtacgtataacgctccgatcgacctcgattgcttcactgctccgttacactgcgtcgtactggctgggccctgcagccctataaaagcccgccgtgggaaagagccgtctcttgtgtttcgagtcccaatattcccggccgacgttcgggtaacaaaaccaggttgacgagaagagcctccttttttggctactaatcatctatcaccgattccccatactttggggtcccgaaggcgggaggcggtcagacgtgtgagtgagtgttgcacagctgcaacctcaggttctaggagcattcctatctcgaaagccgcacaagatcaagtgatcgagtccgagactaaggagcctgcgactcgggggcagagccatctactgctaccgggggccgctcgccgttcggtcgggttccgtgtttccattggaccgtacggcacggcccaaagacggggaataaccacttgcttatgccggccatgttgcggtgtggagtcgacgttggtgagataacccttccccccgagttcccctttccggcagcttccatggcctcatcatgcctttcagcctctgaggcgccggtgagaactttcagactggctgtgttgggagggaggtaatggggttgccgtcgtcctatgaaagactcgaggtgcccagcctgcaaggcagctgaggctgcacctatcctccccgatgcataccacctcgtgctgcatggatgaaaaggttccagcgagtcagcgtcggggcccggttagattgcggcagagaaagagaggcatacgcaacacgatctgccatctgcagaacacacaccatttttcccaccgccgagctgagagccgaagctgcaagcaagcaaaacgtggtagtagtagtagtcagccctctccgaagccaggaacaaaagctggatggggcctgccctttgaggcgatctgcacgacttgtcttgctgcgcatatgaggcgggaaccatctcgccactggctcttcagctggtttatccccattttgtctgtcccatcccaccgcaacactgccagtcccgatattccggtttgtggttgcctaggctttggactcgatgtgggatgttatacgaagaaggtgagttggaaagttgccaaaaggtcaggtctcatctatatcatctcacttttattcctgcataccctacattccattttgtgatagtagtttaaaatagaaacaaggcgttctttctttctttctctctcttactttaagtttatgtgtcccctgttccttcctatcccatccaaagacttcacctctctcatcaccagacacggagtacgcacaatatattctctctctctctctctctccatctctctccacctcgggccaaccttaacttgactttgcctcaaccctcatcccgcggacatcccacggccacaactaccatacatcatatctgcatcataccacatacagagacacaagatgtgtaaatactacgcccacgccttcctctgcaagcacatcaccttctcgtttgccaccttttgcgacccggccagcatgatccagacccgctgcggggagaggtcgatatggcagacgatccgcatggaggagtactgtgacgactgcaaggcttattacccagcaccgtcgtcgtcggctcactcgtcaaggcggcggtaaatcactaccacaaaaaggaaactaggggtcactgtaccgcatgaatgataatttgaaactaccttatgaacaacacaaaagcaacgccagtacgagacgacatgagcatggtatgaggacaagacaaagacacacgactatgacgagtacgaattagacgacgacgatgacaacgaccggcagatattcttttattatgggcggtgggcattagcgacagggtattgcctagacttttttctttttcttttaccgacaccgggaacatatacgaacgttatgattgggatgttatgatacgagtttcttcatgagatgggttatgacagaatgggaaatttgctgtatgataggacacttgggactcctctccaaccctggtggttgaagggggggagtatgatgatcatcattattataaagtttacacaacaaatattttttcatatatccctttgcctaagctttttttttttctttctttttttggttggtatgtttacagtgggcagggccactgttgagcgtatcttgagtgcccggggttttcctgtggttttctcttcttcttcttcattgacatcatatccctttgtcttcacctctgattcccgaggagacccaacacgaatatacctcccgcagatacctcacacactcagcatcaacaaaaacaattgacgacgactcatccctccccccacaatcactaatctcacacaccactcaccttacccgacagcccggatatcacccccttcccgaaactcagccataacacgtcgtgcttgctgcacaggttgtactgacctccgcatttccttctccnnnnnnnnnnnnnnnnnnnnnnnnnnnnnnnnnnnnnnnnnnnnnnnnnnnnnnnnnnnnnnnnnnnnnnnnnnnnnnnnnnnnnnnnnnnnnnnnnnnnnnnnnnnnnnnnnnnnnnnnnnnnnnnnnnnnnnnnnnnnnnnnnnnnnnattgttggagagcgaccgtggtcggtttgtcgtcggtgggctttgcttccttctaaccccaagaatattcccacccggaagagcctcccacacgcccgggttgggaatccttctcttcctctccgtgagctcccccagccgtctgtggccgctgcttctcggatctgaagggcagtacgatacaagattatcgtcttccttttccgggagataagtttggatgactagatcccccgtttttgtgctgacgtatgataaagtaagtgacgtgagatttggctgatgagccctcatctgcggtatgtgcttcaacgtccgcggttgcatgacctcggtcgaaaaggtgcgaaggatggtggacgactcgagatccacgaggtcgactgatcgagaccgcccgatcaaatacgcagacaaggccgggatgggaaggacgcagtggacgtccctggcttctcgctcgccaaagttgacttcggtcgagacccattcgttcccctgctgcctaaccaggtgaacgcagctcttgcgagaggctgtgaggatggctattggtgggtggtggttattgttgaatgagtgagctgtgttggtcagcaaaaaaaaaaaaaaaaccagggttcacgagaggtgttggtaaaactcacatttatctggaaactgtaccgcccagacgagtggtgttttgcagatggtgaaatctctcgactcgtcgacttccagttccatctccagtcccattccgttcctcctcaccagcaccaacgtcggcgttgtacccgcccctttgtggcagaaaaacaacgcttctggcttatgtccgcccaagtcaatgtctctcgtcccggcccactgctgttcctccagattccacaaaaacaccctttgccacgacaccaaagccaaccatttggacccatagtcgatggccatgctcagcaccgggaaaggattctccaaagggcattcgtgatccgaggcgaccctgtgcccggaccctattggcacgtcccaaacctgaatagcgcgatcaagaccaaccgacaccagcgaaccacccggtgacgcagccatcatgacaacatccagcttgtggcccttggtcaaagatttgacagaaatcaacggctcatcgtccggatgctccgaccccaaattttcatactcgtcccggagaagatactttgtacccaacagtatagccgcaaacactagcattaataacacgacgaaattgggcacttcgtgatgcaaaaagtcgtacacggcaggtagaaacatgggctctcgggtgcgagggacgcggtcggagcccttcaagacgaaaatgatgggatcgtacacgcgagccacgtagctgtgagcccatggcttgacgacgttgataacttcccgagccgtctcgtggtcttgaaggcggagccatgaggtcgggcttctggcctggtgaatatcaatcagcaacggcggcttcggagcgcttctaacggtcctgttccatggcaagctgaagagttggctcagccactgccggttgccttctgtcgcatagtgagactgtgccgtgagcacaaagcagatgacgacaatggttccggcaatcctcgtcgacactgcggtttcgccaacacggagttggctgaccagttccatccaggctgacttgtttttgtctttttcggaagacttggtgcgcgacaagaaggccttctccaactcgagcagttccctttgcctgacatcgacgctgaggacagacagcaaaaatgttgacaggtagatgaagtcaaacacggtcgcaatcgcaacaaaggtgcaaaaggcggcaacacccgggttcgaataccgtgataaacccaacaatatcagcaggttttgcactcggttggcgatggcgatgtgtgctgtctctccgaaggcctcccctatcctgtcactgttgctgatggtggaggacgtcataatgacggcgttgatcagccgcaacgagttctccagactgatggcaagaaccaccagcgggtaggcgtacgaaggcacccgagaaagatcaatcttgaatatggcgcaaaccgtgaagctcgacacgatggacgcggtgatctgaacgagtatcgagaccatgagccctagcttggatttgagggcgcgaagcttcctgagatgaagcaacaggtagaacagcgagatggaataggccaccgtcaaaagtcccacatcaggccacgacaagggtcgaaactgaaactcatacagctgatccgaaaggctcctgccgtccgaagggatgattttccacgtatcgctgcgctcatttgccagctcctcagctcttctcacccatcgtcggccaaccggcgagtcccggaggtgaatcagagtgatgaccagggcatcggcagcgacgagacggcgctcttcgaaccgcttgccgctgaacacaatcgagtgtcgcagggtgacattgacagacgtcgactgagttttcctggcattgaccgtctcgagaatgtcctggtcgttttggatattacctgctgagccggcccaatactggagtggcgagtgaaagaaccacgactggttggtgaggccgttgatgatatgataggcatctcgctggccgggagtcaggtcaccatcggcgacttcgggctcggatatctcgggcctgtttgctggttggcgggggttgaaattggtggtcggtcccaaaagctcatcctgaagttcgagtgcgcccagtaagacatctttctcgagagccttcatatagctcccgtggacccaaattgagcgcattatcacatcaggctcaacgtccaactcaagaggctgagcgtcagtccacacatggtgtgggaggttggacacgccgctggtaatgttggtgacatcggtggtgtagaggaaggggaaaatatacaaaaacatgaaaatcaaggccgtcgaagacggcaggacaattttgacatggcttgcagcccattttgcataaagttggaaggcgacccgcagtggatgttctggtgcgagcttaggggcatccgtcgtcctacggcttgtcaacatactgcccgaacgtctcagcaataacatgtaaagaaaccagcacataccctcggaaggggtagagaaaataccacagcatagtcgcagatcgttagggggtggggggtggcggccagtgatgaagatggaacccgtctgcggtcctcccagtccctgccagcaggagaccctggatccttgggagtgcgggagttgaagtgagccggcccgtgagagtaggggagttgaaggctatgggcgaccggtcattattgattgagactctgggaacaggaagtgacgtgccgagggtgaggtaagctgtgttgtgttgttggcccgttccccttccactcactaccaggcacgaatgagcgggccgagggctcttgatcggttacagtacgcaatagcaatgcacaacggtggattgaacgctgcgggacaacggacatgtagctttctgaccgggccgagaggttagtgatgagcgtttgctagtgagggggggagccgtagatctgcaagctctgcaagcttcctgtgacgaactggagctggagctggagctggagctggtggtgtcgtggtgtttctttaagtaggtgatccgtgctcctcagcggatgcagctccggcaggcaatctttgcctcgagcgcggcgagtggttgagatcggggcacttgagagcagttgttgaatgaaatgaatggacccgggatggaatgaggtgttctgatgtgctcttctgtgtgtgttgcttctgctgaggtgtgggggcggctcgttgctgggatgagtgagtggatgttctgttctgcggtgatgggctcccgaccccgtgcgatggggaattccaagaattcgattttgaggcacaccggtctctcagctgcttggcgtcctccctggctccaattaataaagatatccccatcaagtacacactgtgttcggcactggacgggaagctacactaagtacctttcagggaacgtgataccgtatccttagatagcccttagataggacccctaataattatcgcccgcaaaaagataccaagctttcaatagagggagggtgagagatgtctctcttctgagaaaaaaggcttggaagacgtaatgccgatgctacatcgggaaagggccgaagggtccccacagcgcccgatacccgtccttgattttcaccgtcgaccgacagcttctgtgggtcgaaatcgtcgattcggtcccaaaaaagcgaaagctgaagacacttttgggaggttggagttgaccattatcccgctaacgattggcctgtgggttttacctcttttgcgtccccatcgccgccgccggcaggtttttgaagacgtttttcgttggagaggcgtgacaggtaattattgatgcaagggcaattgtatcaagtagaataattccaaaaataaaataaaaataaaataaaaataaaataaaaataaaataaaaataaaataaaataaaataaaaataaaataaaaataaaataaaaataaaataaaaataaaataaaaataaaataaaaataaaataaaaataaaataaaaataaaataaaaataaaataaaaataaaaataaaataaaaataaaataaaaataaaataaaaagacatcaaagtgctcgtgtgtctgtctgtgtctgtaactttgtgtcccttccctccgtgcttgcaacttcaccgctgcactgtgctgcccgcaaaccaaccatttttcaaggttactttatacatgtgagatccaattaggcctcactggcgtcatgtcacatattcactcaccactcataattaccctcgttagcttaaacatccctaactgccacttacaagatggatggtggccttatcgaggatgaatctcacaacccagaccccatagcagaactcatcgaaaactacaatgagctcaacagctccgtcatcgaagagctcaccgaggagccaagtcccctcgagtttatgagatatgtcgccaaaaacacccccttcgtcgtacgaggcgccgccaaggactggaaagccaccaaagagtggaatgtcaattttttgaaagactttctcaaacacgagacggtgaatgtagccgtgacgcctcacgggtatgctcaccttgctgcttcgcataaatctcatactaacctccctcaagcaacgcagacgccccaacaccacaccccaccccatcctcccccctcgtcttcgcccaaccccacgaagaagaccagcccttccccgtcttcctcgactacctcaccacccagtcctccctcccagccggcggtgagcccatcggcgaagtgagatacgcccagacccaaaacgacaacctccggcatgaatacctccgcctattctcccactgcctcccctccatccccttcgcccggatagccctcgaccgggacgccgacgcgatcaacctctggataggaaaccagcactccaccaccgccctccacaaagacaactacgaaaacatctacgtccagatccgcggccggaaacatttcgtcctcctcccgcccatctgccacccctgcgtgaatgagcggttgcttccctcggcagtctactcacgcaagaccacttccccaaccgaagcagccaataaggaggagccggcatcatcaccagaagcagatgggtctacatcttcaccctcatacctagagctcaaagtctcggagcaaaaagtccccttcccaacctgggatcccgaccacccttttcaaaatgaaacagaatactcctgcctcgcctgccctgtgcgagccagtttaaatccaggggacatgttatatcttcccgcgttatggtaccacaaggtagcccagagcgtcgacaacgagggggtttgtgtagcagtcaactactggtacgacatggactttaccgggcccctctaccccctaagcacatttgttcgttcagtctacaaaaaagagttgaggggagaagaggaggaaaaggaggaggaaaaggaggaggagaaggaggaggaagaggcagtgaatgagcaagacctggttgataatgctgagcagcaccaacgcttgacataaatcacaaaaaaaattgtaaaaaatcacatgcaaatgacttcaacatatgcctgatatatcccaggtataaacattttcccaaccattaaaccccctatttcttcttcttcgccaccctcttcagcgccctcatctccttcttcatcctaggatcaaccatcttatacctccccttcacccccttcggcctcccctgcaaccctctgtttgcacccgcagccttcaccaccttaaccggcgccttcctcttcttcttgttcgcctgcgcaatcagcttcgagatgctgctcgccttctccttctcattcaacccctcatcgcccatcagcatatccgccttcttcttcagcttctctagcttctgcgcctgcttaaacttcttcctcgccctagcctcagccaccttcttgatcggtctggcattgtacgccctcagcttctccttgatcgcctgcgcggcttctttggtgatgggcttgtgcggcttgtcatgcttcttctcgtcgtcgaggaaccagtctgggaggccgtcgcggtctttgagggcgtatttgttgtagccgtcgtcgatgacgtcgtggaccgtcttttcgccgcgggcgagctggtgggcgagcgtcatggcttctgctgtgacgatgtcgatgtctgtaattctcatcagtatattgtcaagacgggagtgaaaagaaaacataccaggcttggcatccttcttcttcttcttctccaccgcctcccagtcagaatccgaatcctgctcctccgccattggccgcttgacaatctcaaacgtattatccttctccttcttcgcagccgcagccgcctccttgcgcatcttcttttgctgctcgatgcttggaatatcgtcatccgatgactcagcggcctcctcatcttgcagcacttgcacctcctcctcttctccatccccttcctcctccatctcacccaaaatgtccgcaaaaacctcattttcgaagaaccggttcgcacgtttcgaaagcccttccttccccttgcccttcccatcaagatcgcttatcagcggcttctcatcaacatccatctcatcctcatcctccgaatctgacccgctctccatctccaaatcgctctcatcatcactgttccccttctcgtcagccgagacaccctcccactcctcatcgtcgtgctctttcctcgccttcttggcccggtatttcgcatcagccgccgacttgcgctcttgatactgatcataaagaccgtccagttccctctccaacctatcaccatcctcgtcgctctcatcgtccgtatcccccgaggagccgattccagagtcgaatcctctcctcttctgctcggcctccttgataaccaccatcttgcccttggcaatcttgcgcagcgcaccgttttcgtcaacggccttgagcttaaagatttcgccctcacctcttggaccctcctgctccatgccgatatccataggcgccgtcatgtgcatttgcatgcgcataatctccttggtcttggcctcattggcgcttctcctttccctcttcttcttgcccttctccttgtcggcgattctctggagctcctcctggattctcatctcctcgtccatcggttccacctcggccacttcgtcggccaagctggcctttgctgatttcttggtggggaaaccaaagatctcccggaccttcaaacgccatttcaagaggagcttgaattcttttctcccgagaactttcaaatcggcgcagcatgtgcggatttcttcggtggtctcggggagtttgtccaaagccgccagggccacatcgccgtttgtcgcttgcttgaaggtcaaggcgttgtattgaccaagaatggcgatcggatcggtagtctggatgaactcgctcgcggcaatctccttgtactgggtgtaatcaccctcctcgtaaccatctctcttcctctttttgatctcggggttgtagaccttggcctcgttgttgggagccgcatcggcgacatcttcgaagacggtgcgggggtcgagcaagcggggatcgagcttcttgggcgccttgtaacccaagcaaacaacgaaaatttcggccgagacgttacgcgaggaagggggcttggtggcttcgaccttggtgaacagctgcttgagaacccagaggagagagttgtaatctttcgatcggaaaactttggtgacaaaggcgccgccctcgatcaagaattcggtggcgagcttcagagagtgaagcgcaagctcggcttggttgaacgaatcctgcacccaggcggtaccgacgttgggcgcaccgtcgtggaggacacagtcggctttccaggtcttcaagtgggttcggatcgtggcgcggcacttttcggtggtaatgtcgctctggaaggtgatgaccttggggatgggcttgatgggagaaagatcgacaccgatgatgatgctgtctttgggcatagtctctgcagctacttgacaccacgactatctcatcgtcagcgcataccaaagagggcctgacgtcaaaaaaaaacatacaccgggcgcggcgcaaagatcgagcacgaccttgctcttctcgaggaagccatatttcttgttgagctggatgagcttgaaagcagcacgagctctgtaacccttctccttggcgagcttgtaccacttgtccaaacggcctttgccgtgcttcttctggatcgccatgacttcgtgatgattcccgggttggcgacagcgacgacgaggggacccacggggattttggagtcgtggttgtgtcgctgcaaggcttgggaaattttttggaggagactgcagcccgataagcgataagcgaaagccacttgtttccttgacgttggggccccgctctgctgcacagctgcaggcacttcagtggctgggtggggccctctttacgcgcaattggcacgcgtgattggcctgtcgcgatggctggaggtcgctggagctcagcactgacgtctgataggactcttttatacgcacgaccggcgcgtccagcctgagagcacatggaagcgtgtaccgcgtcttgcaggcaagtgcccgccagaaagaagacgcaaaatgttggcagcccccgctcgcctactcttctgacatcagcaaacctcggatgaactctcttcgacacaatggttccattttctgctttgtgaaagattatctcctgtctcttgtctcttgtctcttgtctcttgtctcttgagactgtgccattaccgtcccggtcctcccttcgagccacgttcccagacatatctctctgtatatcagttcagttcagccgcccccacctattaccgccattttgtcgacgacaggccatcgaccagcccacaatgacagactcaaccccttctactcgagcagcaaaggcttcggagtccacagagaacaatgaccccttgttgtcttcaccaccgagatccaccattggcaaggagcgaagagtgccatcaattaccccgagaaagtttcaaagattcttcaccccccgatcacgggtctcttcgaaacccagtgccgttcgaaaggccctccatgatctcactgctcccgcccttaaccgcgaccaggcccctgcttcaagcccgctcaaacccatctcggaggaacaactcggggctcccattgaggatgaattgcctgactataggaccgccaagcgaagaaaaactcaacacaccccgagcaggtcgcatcttccctcacccctgccaacatctccaggtcttcttgcaactcctgatatcaggccaggtctgagcagcccgattcgccatgtcaagttccgaccgaatcgacggatggatgttgatcaccatgatggagtatcagaggatgaggacgatgagcccccattgccatcgccaaagttgaagaggattgtaccattacatacccgggggttgggtggtcaattggtccaaagaatgtcaggcgatgcctgtttgggtcgtccggttcctggtaggcataacctcatgataccgcctggtatattcctgctaacatgtatcctagactggaggactgatactgccaaattttatagcaaaccggaggacgttcacctttcatcaagtcacgaaggggcgcgtcgtgccattcctttttgtaccactagctctcacagtatgttgatatcctggcacaacacatcagtccaatagctaacgccccacagaaagtgatcttgtagcagtcggtgatgaagaaggctatatacgcctccttgatgcaagcaaggagttctccaagattcacctgtctttccaagctcacggaaatgctgtgatcgatttggctttctccggggacgacaaactgcttgctactgcctcgggtgaccagactggaagagtcattgacgtggaaacacagacccctctcaacgttttaggccatcacactgcctcgttgaagcaggtccgctttcaaccaggccggggacaggactgtgtccttgccacctctggccgtgatggaagtatccaaatctgggacctgcggtgcaaaggtggaccggttcaggacatgtcgatcattaacgaagaccgcctgcgtcatggtgcccccaagcccgtcaaccctggctgcgtggtaaacagcatctattacgcccacgcccgcacccagcggcaaaccaagtcggccaagaactcctccaccaccgacgtagcccgcacgggtgaggtgcccggccgtatgggcgaagtctcggtaacctcgttacaattcctcccccctggccgcgagcacctgctgctctctgcctgtgaggccgatgcctcgatcaagctgtgggatatccgcgccgtccacacccatcgccaccacaagacttccaccccgatctcgttcacttcccccccaccaagccacgcagcctggagaccattcggcatcgccagcatgacgatgaacacgtccggctcgagaatctatgccctctgcaaagacaacactgtttacacctacgccacgtcccacctcatcctcggcatcgcaaatgaactcaaggccaccctccccgggcaggaacccgaaagacggagacactacccccatgtagcacatgagggcctgggtccgctgtatggtttccgccatcccttgttccacgccacgtcgttttatgtcaaggctgctctccggcctgccgcgaacggaaacagtgagatgcttgctgtgggcagtagtgatggttgcgcggttttgtttcctactgatgagaggtacctctccttttccaccccgggcagcgaggaggaatcctactttgtcggggaaagcaccgctcttttaccgactgcgacgccttctaggccggggttgaggtcgggcggtccgcctggcttggtgagaacgaacagcagctctttgtttggtcgtcagcagcacgacatgggtgttgctgtcaccaagaggggaactccgttggtgaggggtcatgataaggaggttggggcgctgacttggacggctgatgggaggaagctggtgacggtgggggatgattaccttgtgaggtgctggagggatggcgacgaggaggcgaaggatttgaggagggggggtgagtggcctccaggctggcgccaagtggacccgggcaccttccctgtgggatctccggtgcgggaggggtgacgccttcatgtgcgctcaaaaatggggggagatgctctcgatcgcgggcccgatctccgaggtactcgagctgcgggtcggcatacatgtatatacttcttgacaggcctttcgctcctgacaccagtgcgagtggcttgcaccatcctctttctccgataggggagcaccgagtcgtgctatttgttagaaacgaatcagacagacagtgccgacgccgaatcatgtgacgcccttctcggcaatgtggcaagaggacactgnnnnnnnnnnnnnnnnnnnnnnnnnnnnnnnnnnnnnnnnnnnnnnnnnnnnnnnnnnnnnnnnnnnnnnnnnnnnnnnnnnnnnnnnnnnnnnnnnnnnnnnnnnnnnnnnnnnnnnnnnnnnnnnnnnnnnnnnnnnnnnnnnnnnnnnnnnnnnnnnnnnnnnnnnnnnnnnnnnnnnnnnnnnnnnnnnnnnnnnnnnnnnnnnnnnnnnnnnnnnnnnnnnnnnnnnnnnnnnnnnnnnnnnnnnnnnnnnnnnnnnnnnnnnnnnnnnnnnnnnnnnnnnnnnnnnnnnnnnnnnnnnnnnnnnnnnnnnnnnnnnnnnnnnnnnnnnnnnnnnnnnnnnnnnnnnnnnnnnnnnnnnnnnnnnnnnnnnnnnnnnnnnnnnnnnnnnnnnnnnnnnnnnnnnnnnncccgatcccatctggctgtaggacctgacgcaccttgtgtggccttcaaatcagcgttcagagaattattcgccgcgggagttgttgatgtgctcaagggtggtccactggagggagtagaggtgtttggagtagtagttctggtcaaaagtaaaagatttggataggaggatcttgcgggatttgcgctcggaggaggaggtggaggtggtggtggaagaggaggaggaaggggggtggagggtggtggtttgggattcggggtccatttcgatgaggcattcggcgttgcgtttgatttctgtttatcatctgtcagttttgatcgaattcaagatggagagaggaaaaaacgaacctcgaggcagaaacgcccgaactctcacgacgaccttgacattggccccggcgttcttctttgcgagcagaggcagcacgtttgggtctctactccgaagtgaaggtgtgctcgcgaaggagcgggagccaccaccaccaccctgttgatgttgattcatcctgggcgacaatgacgacgacgacgacgacggacagtaataaccggcagagtcgggcatcagttcggggtggattgcgatgccgattagggtgtctttgatatcggcgatggcgtcgcgggaacggcggtctaggctgttgtacatttagagattgggtcgattcaatcagttaaacgtgacggggatccgcttgccagacgccagggccctgcaagttgagtgggttggacctgttggttggactgtttactttttggtggggttgttgctcagttgcctggggtgaagagttggtgccaaggcgggttggtgtggcgcctgcaagggggggggggaagggatttgacgtgttttggttgggtgcaacggtggaagagacgttgggagcgttttttggcggttggtagcggggttgttgttgttgtactggcaccgttgtaaagtcttgtcgatagcttcaatatcactgacatgtgctcatgtaaatgtatcaaatgaattactacgtccaagttaccaaccggctgataaaggtctgtatctcctcccgagaactctaagctcccaatataataatacaacagcacaaaaccccatctcttaaccctcaggccttcctcaaccccttcccaagcagctccccaacctcaccaaccaaccccttcaaccccccaaacccttccaccatccccttccccttcaccacatcccccgcctccataatcaccaacaactgctccatctcccccatctcctccccctcctgcggcaacaaataaaccaacagccccaacgcattcaacatcccctccaacgcctccgcactctccctctcccccccaatcgcctccaacaccgacccggccaaagcagcctgctcctctcccgggagggcatcccccggtccagccctccgtttcttactattcgccagcgcgagattatacaacaatcccgccgaggaaaccctcaacgtggccgtctcgctctcccggaagcaagctgtcgtcagttccgttatcgcatgccgaagtgcttgatgagagaggatagcatcctcgtggagatgtgacgaaaataagttgcagctcatctgaacagtaaccagacgcaacgggtaagggcagctacagctttcaacagcattgttgaccagccggaggatagacagcacagttttgcaatcttgttcctccgccagcaccgagctcaccctcgggtcaacaagtgcgcaccgcaagagatcgataaggggaaagagcttatcagcttcgatcttggcgagggagtcattgacaaaggaaagaaaccccgggatgttgggtagggtggcctccgccgggccttccgcagcacgagtctcgaggaagcgcttcatatcccgaactgatgggttggacgaggtttctgctggcagtttggcgaggagtttggccagaggcgggagacgggtgtacagcaccggcttggcgttccggttggagattgttggtaggtcaagagactcgtgacggtgccgtggccaggccatctggacgaggagctgaacgttgcctcggagggtcgcgggatcggcgccggtccattggttttcttgcttgcctttgaggaaggtgatgaaggtgggtgttgccctgacggagtacctgcttctgatatcaaacgcttgcgagatgtctgctttgatgagaacgcccttgtcccccacttcggcggcgagttcgtcgtacagggggtagacgagcttgcatggcgggcaggttgctgatgtaaagaagacagcggcgcaagagtgttggtgccttgccagcagctggtccagctctgtcagggtggcaacattgtgaaccttgcctgtgtgctgatgaagctgaaattttggcttgactgaactgccgggggtgctttgctggataccaagaatgcctccttgtcgcctgttggagttgatttgctggttgagcatgggcatcaacatctggccgaatggagagtccctgcgtgtttgttagctacatcggagcagagcagatagcagctcggaacggcccgctttgaccgggggccgtctgggatgggattgcttacaggacggtctgtgggagattcacaatgtgctcagggatccccttgccgaggaggaacatggcaaagtcgtttgagaagttgttgcagttatgtttccaaaggtcataggcctgggatgtcttagcgatgggttgtttgcctcctttcatgggcaagtcatgttcgcacctgcacggtatagatttctcgtaatgagtccagatactcctcgatcacctccatgggtactacgaattgttagtagggttctggactcttggacgttggatatttcttacagtcagttgtccccagatgtagctgttgctccggctggccaagatgtgaagaaccaggcctgattgccaccacattcccgtcgtagacatattccagcccgttgagtttgatcgaggtgtggtagatggcatctatctgaaaaccaagcagaccagctgacatctgtctggccagcccccgagagaggtcgtagacaaaaagggtcacgtccatgtcgttgcgagaggctctagggtatgaactctatagggagaagagcgggttgaggggtagtgattagattgttaaataaatgtctttttacaatgcaatatattcgcctcctcccctaggcagacgagatgatgtaggtagtgaaggtgctggttctggaaagcttaggaatcacttttggtgcctggtaccggtacctcgcgccgctgcgagcccggcctggtttctccccgataccaaccctccaaacacacattctgggacacgtagaaggtgaaaacacagtcgaatcaagctcattccaatgttgcagtacttgcattatccattacctaaggcccctgtcgtgccctatcaacgcctgcaacagcgggacccatgggagtccttggcacgctgcggcgtcatcccgcccagggggtttgttcaaatccaggccccccaaaaaagggaaacacatttcaagcagcgccgcccctttttttttttcttttttttctttttatccatcgcccatcgccatccagcggccgttgaagttacagttgcagttgcagttgcagtcgcacacaattctcaatccatgtccttcgtttaacaccgatgtgccacacggtctacacagtctagacctctctctctcacctctcacccctccctccctatgagacgcacgtcggtatcgctgcccaccaagcacgttgctcgcgatccccacgagaagcccgaccgctacggattcgaccaccgagaacccggcctcgtcgcgaagatgcagtccgcctgggcccagcagtcccagcgggcacgctacatcaagaccggtgccatcgtcttcaccgtcctcttgctcttttacttcttcacctcctccggcgacagctacatcggcggccagggacaagtcccatcagactcctcctacggaaccgacagatgctcccgatcctactccaaagacaagcccatcgtccaatacgtctccatgatcgacgccggcagcacaggctcccgcatccacgtctacaagttcaacaactgcggcgccgcccccgagctcgaggatgaagtcctcttcaaaatgacggccaagatcgaaggccaatcctccggtctctccgcttacaaggacgaccccctcaaggcggccgaaagcctcgacaccctcctcgacgccgccctcgagaaaattcccgacaagctcaagtcctgctctcccatcgccgtcaaggccaccgccggtcttcgtctgatcggaaaggaaaagtcggacaagatcctcgaggcggtccgccacagaatcgaaacaaagtaccccttccccctcgtctcccgcgaggaaaacggcgtcgcgatcatggacggctccgacgagggggtgtatgcctggatcacgaccaactacctcctcggcaagatcggcggaccagaccactcccccaccgcggctgtttttgacctcgggggtggatccactcagattgtctttgagccctcgtttgagggccttacagacggcggcatgcccgccaagctcgccgagggggaccacaagtacgctcttgactttgggggccgcaagttcaacttgtaccagcactcccatctcgggtacggcctcatgtctgctcgtcaagccatcctcgccgagctcgtgactgatctgtacgaggagcacaagggtgacaagtcctggatggagaaaccgattgtcaacccttgctactcggcgggcatgtccaagatggcaaagatcgtcttgcagggtgaccaccccctcggctccaagctggagctgaacatgactggccctcactgggccgcgccggcgcagtgccgggcgttggcggagaggattttgaagaaggagtctgcgtgcaacctggcgccgtgctcgttcaacggtgtgcatcagccgtctatggccaagacgtttgcgagggaggatatttacttcttgtcttacttttacgatcggacgcagccgttggggatgccggagagttttactcttagggagatgtcggatctggcgaacagggtttgtggcggggagagggagtgggatgtttttgagagtgtgccgggcgcgatggaggagctgaaggataggccggagcattgtttggatttgaactttatgttggcgctgacgcatacggggtatgagatgcctattgatcgggaggtgaggattgcgaagcagatcaaggggaatgagttggggtggtgtttgggtgctaggtatgtcttctttggtcccccggtcatgatgagaaatgatttgatgctaatgatgtgtgatgatgaacagcttgccgttgttgagcaagagttcggggtggcagtgcaagattaaggaggttcataaatagacgaacctttttggagcacagcatgataccgaggagaaaatggaaggaaaaggaaggggtcatggaaaaagaaaaaaaaccacgcaacttttttgatgtcttcgcgtacatacatacatatacaaccttttagttatcatcatttctttttctttttcggttggttggttggttggtctagggtatgggagatactgttgtactctggtaaaaaagagacggcgttaatagggagggttgagcgggtaggggggcggtggttgtttttcgcctggtaggatagaacaacatcatgaatcagggggccggaaatgcaaaaaagtgtatgaacgttgactgttctcatcacatcacgctttcgatacctgtctggctcttatgatgtttcaatgttttgaatgttgaattaattgttatcataaccccccctttttggccttggggtacatacaacaaccataaaaactccaaaaaaaaggcctttgtcttcccatcttcccttgaaaactcattcactccccttgaatatcacaacaaactcccccccctcccccccttctaagcaggaaccccaaccatccccaaaacatcctccaccacctcctcaaccccccatccccccatcaccacacccaccgcctccccctcactcccccactgcacactcctctccctttccatcatccccccctcccaaaccatcacaatccgatgcccataaaccttcctaaccgccaacccgaccaaactcgccgtcacaaaccccaacccatgcagcgccgccaaactcttgcacaaataccccaaacacctcgtcgcctgaggcgtcaccccccccaccaccgccctgtgaatcctcaaatggctcaccacattcatctgatacctcagcacatccacatccacacacgccagcgtcgtcagctgagacagcagcgagatgtcgtcttccgtcatgtgcggttgcggagcaggttcgtggtcaggcaaaggcccgagaccggacgacgaccgtttgatgatgctatcgctcgacgcgacggaaatgttgtcgtcaggacgagaatgctccgcgtcgaggtggtcaagcccgtctttttccgcgtcgtgccaatgactcaagtagaaaaagtcgtttagatggggtgtcaccctcgcttgggtcggggagggggcgccgattatggcaatgaacaagaattgcttcggggcggtttggacagaggttcgtgtaaagattcttcgggttcgtagcagttcgagggcttggatctggacggcgcggggggccaggtggaggtttttggcgaggatgaagttggctatttggggttgttggactggttggtgggttgttgttgatggggaggaggggatgatggctgctgggccgattcggggggagaatgcgcctggtcgagagggaggggcggggctggggaagtaggatccccctgatgaggagggaccgccggtggtggaggagggttcatggcggagatggtagggggaggcagagcgggtgtgggttggtgatgggggaccaccgcgggctggctgggggaccaggagtccggttgcgaactcgtcgagggtggcgtgggaatggcagttaatgatggcgggggtgaggttgaaggttttggatgcgacgaggcaaagctcttcggctagttcgtcgacatagtctgggagagtgcctattaggcagtgttcgcgggcgacaagacacaagagagtggctagttcgaggtcgctgagagaccggatcttgtcgaggagttgttcatcggccattggcttggtgggtggtggtggtgatgtttgctagagcacggatgtgtaccttgataggttgcatgtcgagcgccaggatgcgacgtcgtgacgggggcaggcagatgcaccaccaagccaggccagggatccagcttggccgagtggttgtcggtgcttcgttcgctgccggtggctcgtgctgtttgtgtgtttcgacaggttatgatggtcttcatcgtgggcgcatgcaagaagagtaaaccgacccgtggctggcctggcgccctgccatttctttctctttcccaaatgtcgcgggcgcacagtgatcaactggtggaaacaggcgttggaacttggaaggcagatgctgtcacaaggtttcaagagtggggtggggaaagcccaaaaggcactggtctcataggtgggccaactgaggctgcagggctgtgattggcccagccctcagcatctggtgcctgcccgcccgctcttgatagctctctatcgctgctggctccagccttcgtcactcctccaacagccgattccctaccaacccatcagccccgttcattttatcggagccgcaaacctggaaacctcgaaccactgcccgtgtgctactgagcgtagacctcaacctattttttgggacctcgcccaccgcaaaacttcccagaccagaaaccaacgtcggtcacctgcgcatcaactcttccacccgccttccccgcgtcactgagcctccaaacggaacgatttcccgccatggcttccagaaagaaggtcctcctcaaggtcatcatcctgggcgacagcggtgttggcaagacgagtttgatgaaccaatatgtatgacacttgcccacactcacgtgcgccgccccatgctgactcctcacgcaatcgacaggtcaacaagaagttcagcgcaagctacaaggccactatcggagccgatttcctgacacgagaggtgttggtggacgaccgccaagtgaccatgcagctgtgggacacggccgggcaagaacggttccagtcgctgggtgtggccttttacagaggagccgactgctgtgtgctggtgtacgatgtcaacaactccaaaagctttgatgcgctcgacagctggagggacgagtttttgatccaagcctcgccacgagacccggataacttcccgtttgtggtgttgggcaacaagatcgatgtggaggagagcaagagagtggtatgttgacttgtgaaggggggtttcaggataggtgctgacagatgaaagatctcgacgaagcgggccatgaccttttgccagtccaagggtggtatcccatactttgagacctctgccaaggaggccatcaacgttgagcaggcttttgagggtgagttgagcctatctcttgtctaatctgaccacatgctgacctgacctgcccagttatcgcgaggaatgcgctcctccaggaagagtcggaagagttcagcggcgatttccaggaccccatcaacatccatattgagaacgaccgggacgggtgcgcgtgctaggcaggatacatgatggcatgagatgtagtgaggatgatccagtttgctctttccagttttgggtttttggctttgtatgatatcatgctgggagtatctggcgagttgtttctaattcataaccagggcttggcgcttttttatctgcttttgagaaggcctcgatagacctgcattggtatcaaggtggaaaggcatatatatatatatatatatctatggcgaagctcaacaagatacctcggtgctgggttacaagatcttactgtgatttatacatgtttcaccgcatatcgcggcataaccccaaccctgctggctgagccaccgttatggcgcccggtgggcttggcgccaacctggaacgaacgaacaaacggtcgagctccagtgatcagcgaaatcgacaagatccaaactccacacaacccggttactttttcaggggccgacctttccacagtccgcaccaactccgccgaacaacaagtgtcgagtgtccacaaccgaacgacctcgagatccacgataattcggcccaacgaacaaatccaccaggctttcccatggttttgatcgagcatttgtcgcgaaaacggggacagggtctttttgcgactactacctcggactccaacaacagcaacaacaacaacaacaacaacaacaacaacaacaacaacaacaacaaggctcttttgaagctgaggcgataagtttggaaccagtccatcttgcacaaagcgaagaacgcgaatacagaaaacaatggcacccccagaaccactcctcccagcagcgctggcgccgccagatcaccatcaccacacccaccaccgaccatccggtgatttcggcagatccaacaaacacaatactacagacgacgaagaagatgatatctccccccgatcctcctcctcggacaggcgcaggtcgcaacactacggagcgagggtaatgctaggtggaatgtcggccgaccactcccctgcctcggcaggccgattatcaccacacactgaacaaccacaaaaatcaagactcctcggcggggtagcgaggaaaacactagggatatgtctcctgctggtggtcgtctttttctggacagtctccaactttctcgcgtcgtacatcttctcggacgggacatactcgaagcctttttttttggtttacgtcaatacttcgatgtttgcgatcagtcttgctcccatgacggggaagtacatcatacaaaacggttggcgcacgacgcttagtcaagcaagagagttatggaaggggcggtcagcgccgctgttgagaaacgaccgagatgaagaagacgaggaacggctgctggtggtggaagacgaggggagcttggaagcgaacgacctccccccaagagaggaaaaactgtccctcgcggagacggcctggttgagcctggagttctgcatgctttggttttttgcgaattatttcgcctcggcgtgtctggagtacacgtctgtcgggagtgtcactattctcacgtcgacgagcagtatatggactttgatcttgggagctcttaagggggtggagggtttcacggtccggaagctggttggggtgttggcgagcttggtgggggtgatcttgatcagttcggtggatttgtcgggggcgaatgatgatggcagggggagttttccgcacaagtcaacgtgggagattgcggtgggggattcgatggcgctgttcagtgcggtggtgtatgggatttatgtcacggttatgaagctgagggtggggaatgaggagagggtgaatatgggcttgttttttggcttggtgggcttgtttaatgttgtttttttgtggccggggtttttgatactgcatttcaccgggttggagccggtgagtacttcttcttcttctattctgtttggtgaagttgtggttggtgagggaggggatgctgaccatgtgaaacaaacagtttgagtggccgcctacggggacggtgtgggcgattattatgctgaattcggtggcgagcttttttagtgatattatctgggcgtatgccatgttgttgacgacgccgttgattgtgacggtggggttgtcgttgaacatccccgtgtcacttgtcggggagatgattcagtactcgcagtactcgagttggttgtattgggtcggggcggggattgtggtgctgtcgtttgtgtttgttacgcacgagagccaggagggaggggagggggataaggaacaggagcggacgggagtatagggtgtttgatgtagggatatgtgttacatattttgggggctatcatcaatcgtgtattttgttcgagcatcaccagggcgttttgcatcacatagggcgaacgaagaagtggtggacaatgatgtgtataattcacaaccaccaacagtaaacagttccgggatggtgcaagtagatgaggcttcagttcgttccccaacggcgcgcccaacggtctggaaccgaccgatcagcgggtatttgcatggtgcacggatcgcttaccggcagtgggaatgtctcaagtccgtgatccgattggggccactcagcgggacttgtgcattttctcctcagcaaattgaagacttgcatttgatgtcgagggttcctattgcggaaggggggaaaaaaagaaaacaataactcgatggcggtgtccccgagggaaaatcaacaatcacctgccaggttcacgccggtcaatattggatgcggggttgcggttagaggcttgggacgaggcaaggcgtcatggttgccacctgcttccatgcatggcataatcagggagaccctggtgggttattgtctcgacgatcgagaggtgagtgttgggagtgacattgcagcagcttatgtggtgttttcatccttgtctgtctgtctgtctgtctgtctgttgatagagttttcattttccaccttccacatccttctttttctccccgcatacttcctccgtgcaaggcagcctcgagttgttgcttgtgtgtgtttgtgtgtgtgtgtgtgtgtgtgtgtgtgtctgttgttggtgaggcggtcatccgggcgttgcttctgtgtgtgagtgtgtgatcaggcttgcttgcttctttcctcattttgtcaacaaccaccacgtctgggcggagggaggtcaccggcttgcaggggtcagacggacagccttctttcttatctgtaagactacctgccttctcttgtttcttgcggccgttaacattctacagttttgcaaagtacggatattgctctctcttttttgtttcggccggtatttggcggtattatcattcctcgacacaaccggcggaatccaacagtttggtcaagggcttcaaacggtcaaaggctcttacctaccttacctacgacagcgacgccgccacttggagcatacctacgtggtatattaaccttcaatcgttagcatcatctttgcctaagacctacctagcccctgtctcgccttcaacatcagagacatcttttccaacggcctcgggcgttcgcatcaccgcttcaacatctctcaacttacacctctgaataaccgtcaacatggcaccagacacatcccccatcaccagcacctctcccctcccccacctaggcaacagcatcaacgccgccacccgaacccagcacaccaaactcaacaagtccatcctcctccgcctgcccctttctgtcccgcccgtggcatacaacccaacagcttacctcaccggcctcctccacatggccccaatttacatcgccttcgagtcagcatgggacaagatcctcgcttcccgcgacgccgtccttgaccacccttctagctccctcctcgtcctcccggaaaaccaaacccttccccctttcccgtttggcaccacggcagacccgatcggagatgaaaagtgcgagagggttcatgcagtattgcatcacttgaagatttcggggatggcacggagcgggagtctaaagagggatatcagagccatgtcggggtgggatgagacagaagtggaggagatgctggaacaagtcaaaaacacggggagactgggagaatttgtccgccacatccacgccaacatagccagacagcccgaggtggtgatcgcctatgcttgggtgctctacatggcgctttttagcggagggaggtttttgggttcttgtcttgaggctgcgggggagggtttctggatgaggaagtctgatgcggtgttgggcaagatgtgcaaggatccgattagcatacgggagctgctcgcttctgaggaggaagagggtgatggtggtggtggtggtggtggtgatgatgatgggttggcgaggatcaaggacgatgggttgccgctcaacttttttaggtttgccactccgcttgatggggaggagatcaagactaagtttaagagccgacttgtcgagctggaggggttgctgactgcgggggagagggagcatgtggttagggagggggtttgtatttttgacctgatgaatgggattgtggggcagctggatgggctgtttgatatgcaccctggggatgatgataaagtggaagaagagaatggggcggtggatacttgggctagtatgcttgtgcctagggctgcgatggtggcgggggggaggttgagggatagtgttgctgtagcgaaggagagggggatgagggcgctgaggaaggcgacgttttcgggcggggagcggagcacgctggttgaggaggggaggtcgcgttcgcacacacacaggaggaagagtgaggggaacttggaggggttgaacacgagttcttcgcctgctacggctgagacgagtaccagtgggctgcatgctcatgggactattacgtccgtgacggaattggtggagaagacgagtgtgagcaaggggaaggcgacggcggtggaagggggtgaggcggtcaaggtggtgagatttggggaggagattgcgcttatacagcagcggagaaacggggcgaagagtgtgacggcgaaggcggaggcggtacaacaggatatgtggacgtcacctaagggacagtgtccgcttgctaggattagacgacaggagcgcgggtcagtcacaaaggttagggatgcgagagtagaggggatcaagaatccgtttacgttttggagcttggtcttgctggttaccctggtcggctttggctggggatatgcgtacagatatatcactgggcggtaggcttcgtctttatcagtttggggttctttgtggtggggggtttaatggtgttcatgctgcaatggtatcacgggtatggttttgttcgggagggtgttctgggagggagggggtaacctggtgttttcttttcgtttcgtttcgatacctaggacctgtagcgtttacgactttcttcttcctttccagaggttgttagatgggggcatgaggtcagatcctctgatagagtggagtagtgcatgaatacacctatcaaacctcaacgaagtcggcactgctggtattaatgtcactttgagactcggagcaagaatcttatgctcgcgtagggttgttgctctttagtcgaacggcctggcaccctcgccacaaaacaactaataaacagacgtaagttaagctacatcatgtgcggttgctccagggccgcttggtcccaccttgtgtcaggcccacgctttggctgctctggattagggctttgttgattatatttcacacgcttgatagcacttcagttcattgacaacgaagtctgcgcaatcagagtcggataggcgtggtctcgatatgcctcaacggcctgttggactttagaagcatctaatgacgacgggagagtgctgctcctctgggctgtggtgaaaatccgattgatcgacaccgatagctgtgaatgagaggttggcggagttgtgcgaaattaataagggctcgatcttgcgtaaattgtggtgtgaagcattagccggctgatccgtgtcatggagcgatctccaggaaggaggtcaagatgctccgtaacgctcgctcggcgtcatcgagtggtaaaggaagaggggaaaaagatgatataaaagacgggatagggttcctgcagcagcgttgaacgtctgggggaattgccacaagtctggggtttttctgccacttctgagctcgctcttggtgccactggcttgtcgcgaaccatgagttggatcattagcaatagatgaacaaaccaaagcttcttgactgactagacaaaatcaagaaccggatcggttttccctatatatcgccatcgaactcataggcataaaatcgggacctgtctgccacatacgaccatacccagctggaattacggcatcccgtccgatctgcccgagtcaaacagctgaggggctgagccagtactcaggtgggtgaccgctggggaatcctcggtgttgtatgtttttgcgctttttatctggatcgcgtgtggcctcttcatatgtcggcataagctgggtatttccagttatgtcactggtttccttccatctcgcttcaaacatccttggggcaagtatattcggccgcctggggtttggtgtttgctgttttgtcctggacttcgaccgagcgtgaatcttggtggtggttccttcgttgttttggctctttgcggttctcttgttctgaagattcctcctcgattggggggactttgtgaagtatggttcacggctggtggaaagagggcgcccgttcctaggctgatgggtttgtggaggtgttgaggtggccgaggtgcttccttctggttgctggatctcatgccactttccacaatgttgggtcatcttcgtgcgttggtttccccggtccatctatggtcagtggatgaggaggagccagcctccggacagcatacatatgggggggcggaaggccaacggactgaaagctcgaggcttggtggacgttaaaggtgagaatgttgtctttaatcttatgatattttctgtctcaagattctctacgagcaggccgaaaacgaagagtagtgctgcctcggggggaaaaatctacccataactatactacaaaagaaagatataaaacacaaaacctcttcccaaaaagaaaaaccgaatttatttcccaatcccgtcattaattcccaattcatcagcaacgagtcaatagtgcagaaactatcgcatgggtgtcaccccaaagccagttcatcctcccacatccgtcgcaatgttgcgcaccgaataacatatctcccatatctagacaccattcccaaccaaaaacgccttccataaatgcacctttatatcgctgtctcctcgcgtgtctatctttctattcccgacctgtgtatcaagggaaaacgaaagactcttccagagtttaatcagaaagaaacgcccagtccaacgccaaacgaaaaggggtatctttgaatcgtgaaatgtcatcccataacgccatatatgttgctattgctgtattcgagtatcgttcatgttgggtcgttgttgtgctgtgtttttttttttttttttgaaaaaaaaaaagaaatgaaaaaaagaaaaaaaaagaaaaaagaagaaaaaaaagaaaaccaagaagagaatgccggggagatagtgttgatctcaatggttgtagtagtccgctcaatgacgacgtttcttgttgaacggatcggtgatgtcttgtagtaaagaaaagagatccatctgtgcatgtgatgccggctgtacgtttcaactgacaaatataaacgcttgtatgcctgatgtaatgtatgggttttgtacagcgtggtgctttattgtacacaccggcgatgtcgtgtttaaacatggtctttagaggtcatgaagggccatgtcgagctcatcaaccagaaacaccctacttgaccgcagcttgctcgctcgcacatcagcctccccaacgctcttgacgcggggccgcttggcgatcttgaaggtcataggcctagcagacctctccgagcttgacgaagccggcaggtcgggagcactctggtagggagcaggggaactcctcttgttggcccacttgattcgcgtggtcttcttcgaagtggcagaccaggtcgagtcgagcgaagtgttggagcaagacgaggacgagcgagcaatctcgaggttgctgctggaagtgcttcccgagggcgaaggcacgccgctgctctcgggactgaccgacctctcctgcgctacctcgaaggtcttctctagggcttcgggggagagcttccggttgatgaccttgatacgcggcacccggtttggtgtcgttgagcgactggcagagtcgacaggggtggtcgggcgaaaattggtcaccttaattttggtgatcttggtgggtgaggccgaacgtttgacagagccagttggagggttgccacgtgagttgacaaccttgatcttggtaatattgctgggcgtggcagtgcgtccaagactgtcaacaggagagggggtgcgcgagttgatcaccttgatcttggtgattcgggaaggcgtcgcagaagcgacagccggaggagatggtgaacgcgagcgagggttcacgagaacaatgacctttggcggcgaaggttcagtgggagtccctgaccgggagctctccggggtcgaccaaccctcgggaatcttgatcttgatgacccggatgcttgtcaaactcgccacactcggcgaccgctccagagttggcatcttaaactcaaggtccgctagggcgtcgctagaagagccatcgggattctggcgagcatgctccgccaacatctccttgtactggcgagcgaggttggtgggcggcgcggtgtattgaatgcggatcttgttgggctggaaattctcgtccgagacggtgtccattctgcgcttacgcttaacacggaggctcgccgtggtggaggtcgaggcatccgtctcgtcaccgctgccgtagaagtcctgggagtcggaaacaacagtgctgctctcagcaccgccagccttgccggcactgcggccgtcttcgatctcttctccgggaagcttgaacgggcgaccaccgggcaaaataacacgccgaccatgacggcgggcttgtgtctctgtgagctcagtggggacttccagctccgaagtcggcttctcggtgatctctacattgtcaccgactggatcaggctctgggttgctggcaagtctagtctcgagatcaagatcgacgcgagcaagctggctcaggaactcaggaagcttctccaaaaggccggattggcaaagcatggcggcgtcgactcgcttgctggcttcagcatcaccaccagacgatcgacaagagcgcatctcaagagcttcgttgatcagctcgtcggaagccagtaggggctcggtgaattctgggaacggctcagaggggatggcctgcctctcccaacggcgaaactcgcgaggatctcccgactctggctcgggcatggcggtctgggctggtgtttgttgttccagccgggcgtgtgctaaggttgcgagttagtcaataggtttcggccacaagctggggggagagggtggtaacgaaccttgggtgttcatgttgaacaggttggggtactgcttgagaagagcagttggtctcttgaaggcgtagttgtagcctttataatatctatccgcccagttctttgccttggaagtcaacaacttgatctcggcacgatcggttgtgttgaagtatttgagggcgacattgacgccctcgcgcaggtgaacctgctcgcctcgacgcgaacggggaagttgtccagcagcgccggcaggcccacgaggtaactcgcccgcacgcgaagatactgcggtcgccatttcaagcaagccgcgaggaaacgaaaagaaaatcgtgagcgaaggaagagatggtgggtgggtggtcgtgagtgaaccaaggaagactgatgaatccgaaaagttgctcgatatggtcttgcttggttccaaaaacgaaagatggttgggaagaaaagaaactcgacagagcagagaaaaggcttctgattcatacctggtcgggacttgtatgttctgaagtctgctgttgttctgacccttgagtggtgttccaaagcagatggggctgattgcgatgaaaacagccaattggtacccgatgccagctgtcagggtgggagtgagatgggattggagcttctctcatgaatggctgtgtggaagcaagtgggaagtattgtggaggagtgagagcaagtcgtccaagtgggaactgtgggagcaaaatgtcctgcaggtgatggctgtcgtggctgtctgggatggatctcatcgacccagctatcagcacaaggcgggcgagatcaaccaatggccttggacatccgagggaacaattggacaatgaccagtctgaataaagcaacaaacaaagagtggccttcagttgacagaactagcacgagaagggcccgttgagtacagcggttcggcccagagtttccactgtttgaaagaaaagaggcttggagaaaaaaggacaccggctgaaccctaaaacgccaaccactttgacactgcttctgatatcggaaaaggaattgaatgggcagatgatctcttccattgcatgaagtgagtgagcgtgtaagtgtgtagttcccgtcgtgatgccccacacgtcaaatgacagtgacaatgacacaccctgccctgccctgccttggcctgccatgggacaggccccgcatatgccatggaattcacatgggggatccggtgtgtaagtttgctcagaatggcaacacctttctgttcgatgtcgaatcgaggcccaaccgatgccccgtgttggtgggaactgacacggaataccaggccgttgggtagctcgaaaacccggaaaatgcaggttgcgggctgcctgacccgcaccagatcagcccaagatctttttgctttgtctctcggtatatacagagacaagcagtacgttatgagatggccaaccacgtagcaggcctcgctgctgaccatgaatggccgtcgaattcgacccgacccagcgagacgcagagggcctgccaagaccaccatgccgctgccccgctacgatgcgagcagcctcatctctgccccgccattcgcacatgtctctgctcacttttttttatatgcgtctgttgtccacaggctgcagaccattgttcttacgtggacgcgcagatggcttcttattctgcttcttgtttagtccgcccgttgcagcagtcactggcctactcactactcacttacagcaagatcagcaacggctcagcctccgaagcgcccaagacagcggaacagcggacagcgggtggagcgggcaccaaaaccgcccagaaccagccccactgtcagatgttcccgcccctgttgaaacaaacagcgtgttgtttcagcttgtgggaaccgctgacagatttcgtcattgcgcttctctcgactataatcatcaccagtgactcagttgatgactttgtctcctggattgtctgcagaagtttagtctgatgatgactggagatacccacaggtccggtaggcactcatcgatgagatgaacggcgctcagagctacttagcgtgatgcttgccttaaaacgccgagatccgctcacacaaaggcccgggcatctcgacgaccacctaaccacaccatcatggccgtctttcggtgaggttcgggagatcctcccttcttaccgcccagccaagaagccatcaataattccccgactcttgcatggaaacagtcgaccagaccttcagccatcgacaaagccatatcacacgttcgaagacgtttggtcccatacaggatatatcccgtatatcccgtatcaagctggcctggctctcgtgattggtctgcccattgatctccagatccacttggatgtttcgagccgctcaacaagggaccctcgtgcttcgggacggtcttccacatggcttcctttgaaggtcgattccgaacatcgcccattgttttctgtctccagaactctcttgtcttgatgcctcagtgatatccgttctttgcctaccactcgtctctttgttaacggctatcgccactggaaactggcagcagcgggtaagcacctctagctgcatccccacatctgccacaaccacttcagctgagtgggtggtggtctattgtcgcacacacctctttgattctccttggccggccccaacccctcgtttcgacccttcaccccgaccgacaaggactcaacgttccatcggggtcgtcaaccgttacccctgaacagcgacccggctcccgaatctgatcttggtgatctttcttggacggggaaagcaaaactgccatcccatcttaccgcctcttgaatccccaagcttttaccaggcggggtggtgatctttcttgaaacgacagacccggtccccttgacctctgcccctttcgccgcagcctcgcaggaagatccggccagctgtcgaagctttctttatttacatacccttctcctgcttctttcttcgtttctgctttcccttctcgctaccacccgcagcagcaagcaatccccaacgctgcccgccgaaggagacagcttcgcctcttacgagtccacttgctgagccgcacagtatcggtctacagctcgaccagcactgagcctcacggtgccagtcccaactcgacctccaacctcaccttaccatacctaccaactcccccatctcaaccatcacaatgtcccaaccccccaacccccgcccaggcctaggcctcttcacccgaggcctctcctccctctcccaatcaaccacagaccccaactcgccctccgtcaccacccccgccgagcaacgcgacgacgccaaacgaaacttcctcaaagccatgcgtcccctccccacccagcactactggaacgtctggttcgaccgcccccccacctccaccaacccaggggaggagtaccactccaacctggaacaactcggcacaaccatcgagtcggtccaggacttttggcgctacgcaaacaacacccccgtcgaccagatccggatgaaagagtccatttacctgttcaaggtggggttcaagccgatctgggaagacaggagaaacatcctgggagggtcgtggacgttcagagtgccaaaggggaacgggccggatgtttggacgagggtgcagttgttggctgtaggggagaagttgcagagtgtgcttgaggagggtaagctcccctttccttcccaacaattccatacaaaatgtgctgacgtggatgaaacaaaatataggtgaccaaatctgcggtgtcggcctctcggtcagattcaactcccatctcatctccatctggcacagagactcctccaagaaaaagtccatcgacgccatgctggagtgcgtgctcgaggagctccctcctgagctcacccccaagccggacaactacttttacaagaagcactctgatcatgccgggttcaaagtgccgcccgagttgcaggccgtgattgattcccagaaggcgagggagaaggccgctgctgagaaggctgctcagggggtccaggctgtggctggggaggcgcccgagattagggaggtgccgccttcttcttgaggaatggaatgggtgacaaagatgtttagtttggtctagtttcgtgcatctagtgcggcgtttggcatgatttcgattacgtgaagaaataaaaaaatcccgtgaagggtcggtattttcctcgtttgagaggtgaatatgtacagataaagcatttgaagttatcttccggttcatctcgccaatatggctctccccggtaccagcttgtagctatgtgtaagctaggcgtgtgaccctccccaatcccaatcctcggcacagctttcatcagcagcattcttcgagctgttgaggtttctcgttttgctcagtgccaacagatgtccccaaggtgctgctccctcccctcctcgtatcttcttggctcgaccttccttgcttgctccctgaagagcagttgcgtctttgtggtcggtctcgcttttcatcaacatgccctccagagcctctctaatcccaagcctctctctcggccatctctgtcttgagccttttttcgccttatctcccctaaccagcccgcccccaatcatcacctccaaaagcccgccctcctcataggcccctcgagctcctccttcctgggggccctccccacccccgcacccccattcgcctcaagtatcatatccctcaacacctcctcgctcacctcctcctccatcttcaacaacttggccacctttttcaaactcgccaacgtaatcgcattcgacccgttgctcgcaaaaagcccaaacgcctcgtccacctcggccatgtgttcctctgaagagtgcgacttgttgtgtatcttgagcgcgcagacggcgaagaagttgggaaaagtggcgtagccgagctcttcgtctgggtcgaggatagagagaaggtccgctagttccgagggggaggtcggggggaggccgagggcactatgcacgtcagcgagaagggatgggatatggataaaggaaacatacatcaacgccctcctaacatcatgagtaggaataacccgctccctcccctccccctccatcggctccgcaaacaggctgaacgcctctcttatctctgcctcttcctgaggcgtgacgttgtgctcttttgcgaggcgggattgtttgggtggctgttcacacaccatcatcagcaccgtttccaacaaagaacaggagatatccgtaccattttgacttttactcccccctttcccacctgttgtaacgatatgaaaggcagtaacaatctcggaaatcgcttgcgacaaactcgcgccttgtcgcgatcactcgagctcgctggcagcgatagcttagagtggagagccacaatcgacagtggagcgaacaaagtggggccaaaaatcgcggtttcctcgcctggtcacgtgaagcatccactaaaccaacaaaaaaaaaaaaaaaaaaaaaaaaaaagcgaaccataaaatccgagtttctttgcaagcagaattctctcctggacatcaacagacttccccggccagcagaattccaaacgcaatgctggcttctctagaatcctctcatgtcgtttacttcataccgatattcaatcacaggatcgtcgagaaaacggtaggtctctcattttcttttttttatttctactcaacaaaacgcttcaaaatttgctagagcttgtcgtctccaacatatcccaggacgaatcaagtgtggacagtgaagcaatattaaaacacaaaacatgccattcccgttggaatcgtatgtcctggggctcctgcgtctcgtctcttgaaaggcggggtgattggggtcaaaggagacatttatttgcctagaaatcaataattttgattgcaactagagtttatgtgtttgaggctccctacaagctatcaactcctgcttgcctgctcgtgactcgactcttgcccactcacttgaagttattcttcatctccctgagcttcgtcatgatagcaatcgggtccgtctccccagttgccttttggatggcggggtcttgcggtctcataaagacgttgtgttgctgggcatgttagcatcctgattcatgtctgggaagagaaaacacaccttctcatccccaatcgtaaacttcccctgcgtctccttgcaatcatccgcaaacgcctccagcgccctcacagcctcgctctggagaaccgacaccccgaatttaacattcgacttggtgtactcatgtccgggctgtcccatcattagcacccacccccaacaccacccaggaagaggcactcacataaaccctaacatcatcccccacccccgccaaaaccacattcaacgcctcatgcatctcctcccccgtcccctcaaaaaacctcccgcaacccccgatgaagagcgtgtcccccgtgaaaatcaccttgtcccccgtctccttgtcctccatcaagtaacagatgctatcctgggtgtggcacggcgtgtgcaaggccttgactttgatgttctccccaatggtaaaagtctcgttatgggccggggtcttggtgacgtgggcgcagtcccggccgccgataatagggagtttggaggggagcttcgagaggagggcttcgttgcctccggcgtggtcacggtggctatatgctgggggttagtagatgccggtggagtgtaaacagggagatatgtactgactggtgggtattgacgatagcagtgaggttaatctctttgttcgcgatagcttcttcgaggacggggaggactctgcctctgttggtggctgttcatgataaaaaagggagggaagggtaaaaacgtactcggggggattggccgggtcgataatgactgcgtctttggacttatcgtctaccaccaaataggcgtagttgtcgccccctttataaccacactcatcatcagtaattgcccctcccccaaccaccgccccccgnnnnnnnnnnnnnnnnnnnnnnnnnnnnnnnnnnnnnnnnnnnnnnnnnnnnnnnnnnnnnnnnnnnnnnnnnnnnnnnnnnnnnnnnnnnnnnnnnnnnnnnnnnnnnnnnnnnnnnnnnnnnnnnnnnnnnnnnnnnnnnnnnnnnnnagacgtgagaagtaaaattttgctcgcatggcggaaaattgtgagtaaaagcgacgaccccaatgggaaaatgaggtctaagtcgctgcacgacaccaatactctcgacgcatgaaattcaactgagtgaaaacaaaaagtttcacttcttgttgaacaggtcatgtacttctcattgcagcaaatgctctcactcacatcactcatctcatcactcacccactcagctcagctcagctcagctcagctcagctcagctcatgcatcatcaaatgaaatcatcattcatcgtccgtctataaacattgctaccactttttttctgttccctttctacccgtatctcatttccgggtttcacttcttttttcgacctcatgtctaagaaatagtcttctcaaccatagtaatcccatacttcacctccaactccctcatcaacggctcgcaaatctcccagctcatcggcgccaacacccccttctggctaatcttcccctccaacacctgcttcaccgccaccgcgcagggcacacccaccgtcttcgccatcgccgagtaccccccaacaacaccatactcgcacagcgtgctcgtcctcgtctccctgctcccatccgcatgctcaatctcaaacttgtgctgcagcatcaccagatccctctccttctcctcatactgcatcttcttctccaacgtcgcgcaaagcgtatccaacgggttgcccttgggagtgatagcctcatcagaaaacagcccgatccacttcaacccgctcacaatcctcttcttgtcctcctcactctcaaagctcgccttggcaagaatggtcttctccaaatcctcagcagacgtagacggcgccccaatgacagcctgcgtggcctccttccaagaaacaggcctgctcaggatatcaagcggggtctcctccaaaaacccaatgtccaccaacaccttgatgaactgagggaaaccctggtacctcagcgtccctctcaccaccgtctgcgcctcgggaatgttgtacctctccttgtaaatagtgctgtccctgttgggataagccacaaacgcgaaacccggatagataaaatacggcttggccgtcttcatcaaatccttcccctgcacctccaccacctccccgtcctgccaccacttgcccgtgttcctcagcgccagcagcacacccctcgacgaccaagagaacttgtaccccaacgggttatcactatcctccggcgcagggagaccaccgcagtagctcaagaagctcaaaatcttgccgccggccttgtgaacttcatcaatagtcttgatggcgtacaaatgatcaatgccgggatcgaggccaatctcgttcatgacagtgatacccgccgccttggcctcggcgtcgagctccatcatggcgggggagacatacgaggtggtgacgacattcttcttgttgcggatggccgacttgatgacggtggcgtggaaggtgtaaggaatcagggagatgacgaggtcgtgcttggcgacttcggcgtcgagggccgtggggtccgagacgtcgagggagatgggggtggcgttggagacgcccgaggagagggattgggctgtggccagagtgcggcaggctaaggggagacggaaaagttagaggtttggtttggtggggaagttggatacgagagcagacagaaataacataccgacggtcacggggatgccggcctggctgaggacgtcaagagtcgggcgggtgacgaacccggcgccgagcatgagaaccttgctacattgagagttagtattatggcttcaaatgattgggtttatcacatcgtgatgttttggtcggttggaaggctgggtagggatcacgaggtggttcacggtggggcaaacacaagatatcaatggtgttgaacttactgttgagaagccatcttgatcttttccgtggtaactcttgtgaggtgttcagagttctcccccagttgctaaaacaagacaaaaagttgaagcttgagaaaacaagtcggttgactcacttgccgtgtgttacaacctgcagctctaccttatccacggcgacttgttccgataacggacgcccaaggttttatcaattcaactgaggggttgaggggcaaactttctggggacagcttctggggttgtggggtagcaaaaatgggctggcttgccattggttgccgacttgtgttttttcactgttcgtgtttccccttaccccctgaattttagctccgcaatagccaaatgtttgtaagcagccatcatcatcacttctggggatcacatacgcattatttggaacaatggctattgccgaatcaaacctcttagtcctttcttgaatttgtcggcaaaaaaggccaaaaagaaaaaaaagaaaaaaaagcctaatgatacaaagtcgtgtacactaggtaccttttacacatcttgtgtgtatgccccttcctgttcttgtcttgccttcctcccaggagtcgtgagactcaatcccgatatctcctcttcattgagtgtagatgttcctcccattgccttcccttgctatgcagttatacatgcccgttaaagccaaaacgccgtgtaaatgctacccatatatgctgtcccaaaaccttgcttcgctatgcagtgatgaaatgtgaaaagggaagaaagaaaaaaagtacaacaatattactcgtcatcaccctcgccatcctcctcttcctcttcgtcgtcgctggcaggaggctcccagctctcctcaagcttgagacctaggcccttgttctcatcggcagtgggagcaggcccaccaagcagagagaagatggtagaccggtgcacgtccggctgcgcgtggctgggagggtcatacagacccatgccgtaaagaatctcgccttcctcttcatcctcgtcctcctgaacctgcaccgcctgggcagaaacaaagctctccaccttggatggtgtcgtctcgagactcccatagttgttgaggctgagcggtggagggcaggcaaagtcctctggtgtgggaggagcagtgtgccgttgtacaggcatcatcatgatgttgttgtgagtgggaccggcagtagggtaagcgttccagcccatggctccggtcgtgcctggtggtgcgggctggtacatgggggccggttgctgggcctgaacttgaggcgagtagaggggctgctgggagctgaaactcgagtacggaagagacaacggcgagaatccttccgcgggagatgcgtagcccgagtagaccgccggtgttggtggcaactggtgcatggtcgccagtatctcggcctcgctgtaggccgggtagggcgagcagagcaccgaactggtttgtggtgggtaaaactgagtctgagccgagtactggggagaaggatgccagctgaccggcctggcccgtctgacctcctgtccgtagaaagactcgtttgaagcttcgggaactggggtgggaagataggtcgggtcgacggcctgtggttgttgctgaggtgggaatcgtccgtggaaaccttcaccaatcaatgtcctcctcctggactgcatcgatgatcgggggctgttgttggcactcccaggcttcgataccctcatcgcgttgtttggccgttgagcatattgtggtacgtgctgagagcaccgtttcgtgctgccgagttgcctcgagagctcgttgagcagggccgagtcaactggatagtcgagaggttggggcgcctgaggcacctggtgttgagagagctggtgggggagaacacctcccatgtgggcgttgagcatagcgggcaccatgttgactggctaccggtaagacatcaagtggttgtgttgtttgtgtgtgggtgttgagagagaagacaagttatatcaggctggtatggtctcgatataaaaagagatctggtctggaaaagggaggaagaagagagattgtgatgggtgtcaagttccttttgcagagtcaaagtctgacaagggaatcaacaagaacagggaagggcacaaatagcccaggtgtaaatcaaacctagtttgggaaagacgaagctccatgttggcatggagagggagatgagaataagaatgagaagccaaaccggtgccgctttggcacgctgtgtgtgcgagactgcgtgtcaaccgagcttgtccatgactttggctccggttgtccctctcgcaggcctgcgtcatatgtacgcgcagggattgtttagcctacccgacccttggagagggtctgatgaaagggtttcggcctcttgtctagctgcaagccggaggtggtatggagactcatgggggagatgggcagatggccagatgcagatgtgggcaggaccagccttggtttgactgaaagtgaagagtggtcccgagacagggttgcaggggcaaaagccaaaacctcattcctcgccgtgggccgtgggacgtgggacatggggccgtgggtcggggctggtggtaatggtaatgatggtggtggtggtggtggtggtggtggtggtggtggtggcatccctcgcgatcatcctcatccatagcacatggtggtattgcgtgtctgtattacggtatcaaactccgtaccaagtatcatttgggttaggatgggcggtcaagcggagtagcaaatagcgtaacctctgggcgggaggtacttggtaacaggacacaaggggtgacccaggagttgacgagtgaaatgacggcccagcgtccccgacaagaggagaagcgtgtgcgccgcaggtggtccaacaggacgccagtggacgcctttcccttcccagcggcacccacaccagggagaagggagaagtgagccaagcaaaacaccccggcacctgtgggaaggtaaaccgaaccccggccttcccccgttcctttcaacaaaaggcggctgagcgaaaacaggaactgcagaaactggcacacaaccgccatcaaaggcacggccttggcttggtgctagaccagggtgtatcctcaagtaagaaagtacacaccttgacaaattcgtggtgaccccttcaaagagagaaggaaaaaggtttggctcgtccgtgaccgagcaagctttgacgcgagcagcggccaagatacgacagtagcgtcattatctgctctcttctctttttttttctctttttttttctcccactccgtagagaggggttccattctcgtgcctgcagtggtggacagcaggatcgaaaaaaataaaaaggggatggaagcccaggccattcggtaccttttaccacataagtcttgatatcatgcccaccatacctttttcggcttaaaagcaaccagttcctcagacgctgtggagtgtggagacacgcacggcggcttgacccatgcacatgcccgccatctggcaaccagggggccatccctgcaccgcaagagaagcgtgagaagaaggcggcttggagggagcgccggggcggattgcagtgagtgttccgagactcgggcgggcgcggcgctctgtagaggaggggtgagagacctcatcacagatcagccaggatcagtttgaggtgtacggtagcggtggcggtagggggagggtgtacgctgtggtgaactgtctggatgtaggggtgtgagactctatggcggcgcggctcactcgtcgaaacactttgcaggcgcacgagaaggtgaccttctctgatcagcctggccagtgaccatcagagagacacagcacggcgaaaagaaacctgtcttccggtagagactgtgatgatacagatcaagtcagctgttgggtgccacagacgcccacttcgaacaatgtaccctgtaccccgaattgtgagtctttttacggcttgctgctaggctgtttctcgaatcgaaatcgggtcgttcgtgatgtttctttgctgaccagtttgccccaccgacgatgatagcctggcatggcttctggaccaccggaacgccagggctcgggctcgggctctcggccaaaatggaacattcccaaggttggcctggcgctgaggcgcgtgggcgctgaccggaaagctgtggctggggggttatcgtgctgctcctggtggtgctggttcgcgctctgtacttgtccggctggctgctgacctatggatgcggcgttttcagcagcactctcctcgagcactagggggccttggtacagagcgagcatgaccatcgatcgtcatggtcattttctcaccatgtcccagtgacgcgagtatcagtgatgagtacggatacactacacactcggcagtgtgcattccgtttcgtcggctgcgcaggagaagaaagtcagcaagccaaaagcaacgagcagaaaaaagaaagaccttgacaagaatggccggtccgaccgccgcgctccacagaacctccacagaaccatgcgactgggcgccaggttgcaggcaaaatgcctgttgaaacggggccatggagaacagttccatgtgacgtttgacggacagatgagtgaaattcattgaaattaccgtttcaatgaggacaacatcatcccacacccttccgcggatgctggcgagtccttcccacctcagggcattggaggcattggagggcaacggaattggaacgcaaactgccgatgaccggttggccagggagactttcgcaaagagggggggtgcaaaaaatgaaacttggcgttgcgtgggtgggcgttgggatgcaaattttgctaaacgagagagggtcaagaccccgattttccacttaatcccatgctcggcccagcctgggaggggcttggcgtctcgatattggcttgatggagacactccttttcacacaccctgttgcccagtgcacacgacgttgaagttccctcgaccaatcagagaacacagtgtcaaggcccatccgtgccatctcagatccatctttttgtgagatcgcttccccacaaggttcaacctgagaaagtgaactttgcccagagccagcaccaccgagcagatagtgcaatgtcacgacacaaccccgaaaagctgaggtggtcagcagatggagatgcaattttctgcctgcttccggcttccacactcgtgtctggctgacagtcacagtcacagtcacagtctcagtctcagtcccagtcccagtcccagttcctcagttcctcagtccctcaatctctcctcttggtttctttttctctcaaacaaaaagtgtcatgccgtccacgtcttctcgaatctccaagtacctaccaccccttgatcgcccggtacgtactttggttacccaaaacttgattcgccgaatcgacagccgagcgacggagctaggagcggccccaagatcgaacgggcaagacactatttccgtcttcctggtcgtcttattggccgcccgactattcgacatggaacaacgctgtaagcgcagaactatacggaggtacctcctgcacacgtctcagcctcctcctctctgcagttggaagaggccattccatcatttctgaagtctccgcatcgacacgcaacaacatttcgagtcagcatcaaccatactccgtaccatccactcactagtacagtagccgaaagagaaagggaaaaaagtccctcggtcagccgattgatcctacctacagagtactacctgcgggaatcgcggagcccttcctcagcactattgtctctcctgcgtaagagcaatatccaccctgctgttgcattcacgataccgaaatacactacacttgtatagtgtgccgatctgctgaacaccctgacgaagtttgcactcgctcactcgcttgctgacatggaaagttactccgtaccactgccaccacccaaaacagggagccccagcctcgtacccggtacgcaagatttgcatactagcacgccctagccaccagttctcggtactttctgtcaccattcaccgctcaggcccggatattacgataaatctggaaagcagcaccacatttgcagtcaaacaccgcaccggccctggccccggccggcagaaacctcgatacaacaagttacacacttccactttgcagcaggctgatgcaaggcagtaagcccaactggcaacctggttttggatttctccttcctatcaacgccaatatgactatcggccccaaatcaggaacgctacctacatgatccgaccggccccttgttgtgcccctcctctcgtcagtcttttctcagaacggagttcccattcccatggctacaacgtacatagggcggtcgaccagggccttgtggtgaagcacgggccgcgctgcaagtctcgcgctgtcaccatccgcatcctctccaaaaagcaaggaccatcagacgttggggtggcgtctgcgagagcccatcttgatccctgcaccggagacaacatggtttgacgtcctgcgattgggccgtggccgatggtcaagagccattttgtgtgtgcatgccgccatcacaatgaaatcccacaagccagccccacgctccctcaccgtcaacaggagcctgtttcgagccgcgagtttccgtacagggtcgttcaaatattaatcagacaagcatcatcagacctgatccgagcaccgaacacaacgccgaacaaactctcatatcgatgcagcccatatcaccctcacccgggaggtgccctacatgactcgcccaagcagcagtgttgtttaccccctctatgctaaattattagtgaccaaaagccactcatcaggctggctggcttgtttcaagccaggtcagcttcttcttgcggtataggcatgctcagcagcagactcgtggccctcatataaacgacgatcccctgagtgggacatgttcgcccttggggtccctcgggtgcgaatgcggcaaaaccaatcaaggccgatggccgtggagccgtggaagccatcgttgccagaccatggatggctcactgtggctcggggagcttacgcagtaccagataggaaaccaaacccaggcttcggcatgcccatcgggggatcgatggaacacagtcgaaaaagggccaaacgagaacatgcattgacaaagagtacagctctagacatttctgtttgaacctcgcaccctcgatacatgagccaacccgcttgtggccaccgatacaactccggctaagacgagacaggagaagctctgccaggtattaattgctacggaaggccttctggtgccaccgactgtgcatgcaatgccgctcgcaaatctgtttttgccgccgcgcaacatcgtcttgggctcgcataatgcatccccggccccatgttatgactgatgaacaactgttcggagcagcctccagctccaacggtggagggtggtgtcagagagcacggagtactgcgtcgtcgtcgtacacccgttattaacttcttccacgccctacatagtttgcggtatcactgatacatgcatacatggccctggcttttcccgcatgacgcatctctaggtatgcatgtaccgttcaacccaggccttcctaacaatggatccaacaagtacgaattgttggccgacagggatggtacaggctggactatccaactaaaccgagccttgggggagggggctccatggctgtgtttttgtcacttccacctcccacggctgcaacaagccctaggttgcaagaggacttttcccccccgtccagcatctcatcggcttcgaaacaagggacagctcattcaaacctgccgccgcctgttgatcctgcacgctcgtctcccaagacatccagacgagtggacgtcagccatcagtcacaagaatgcgcatgcacaaagcgtaccacggcaaaaacgcccaggacggcggcggaggcgcgtgttgggcttgacttgaccaaaagcctgcgagcttgtccatgcgtcgtgttggtctagtcggggatgcagcaaacgtctctccattcaccgacgttcgaaaatcgaaaaagggcgatccgataaaagcgtccctcacaagcctgcagccgatatttctccatttgatcgccttgtcatccactcatccaccctcttctcttcgccgccgcagacggaaacactttgccggtttggatggcttttgatgaaccgctcacttcttgctttcgttcgctggcaagatcctccagggggggacttttcccactttgctcgcacactgcactgcgctggctggctggctcattactcctgtcctgctctgctggggtgcgtgcatacaagctcctacggcacacggaattagagggcaacgaggggctgttcttgtatcgtttcgaaatgtgctcgcgctgtgaaatggtgtatctcattaatctggccgtggctgatctgggcaacagtcgattcacgttgttttgacctccacaggctaaagctcgcgcccgcttgggccaacacgaagaggcaagtggttggcggtcggcggattggagggccagcgggagtctcttgtcgcattcatttgccctctttggtgtgagtgtgtgcgtgcgcgtgttgtgtgtgtggtacctatcctgctcacaattctggagacgggaagggaggtgtgggggtgtggatggccatgtcattggcatgcagctgttactgtctccgagaccgcgctggctgtgtgattgcagcagggcttgttggaatgtgagtgtgagccatcagcccatccggaccgcctatgaagtggtgaggtgcacgactatcgcccccgtccgctagcactctttagcaggcaacgcaggccagcagccccctctttggctttccgccaggtactgaggtacgtattcaccgctccttttttggacccgaaccgcaccaccaccgcaacgccatggtaggaaggacggacggctcatctggacgggtcacttccggccattatctcatcacctcggcgcttgtggccgagccttttcaacatgcattacttatacggatgctcttttcgtcgtttcaacaaccccgccgcggggagtgcttcccgtccaataggtggtggtggtcacgagggggttgccatgtcctttcttgttccatcatggctaaccacctacctatctaaccgctcacaccttacagctcacatcaggccgcgaaccaggcggtagggatttttgtctcctttttttttttttttttagactcgtcaaccttggggggaaaagaaggaaaagcaacacgacgtttgtttgatattcctcagctgccgcatatgactgggcgtatgcatccacgtcatccacacacaccacacccatccacttctcatcctcctcctccgcctcctcctccactcatccatcatccactcactccatacgcagtggtcagctaccccagattgggagatgaggagacgccgcaggcgggggggaaaaccagcatgtgcgctaaggctgttgttgctgagctgctagatgagcaaagccctcgtcttgaacctttttggtggccagttccacagcaaatgcgagctttgccttttgggacgacgaggaggagacatccaccatgtgtaacgacgacgacgacaaggaggcgtacagcaccccagcgatgaatgtatcacccgccccgatggtgctgaatatcgacgggggcacagcaaaaagcaccccagctgttagccaaaagaaccacaacctttttttttgtcattgtgttgtgttgtgttgatcccatatccggaccgaattaagagtttatgtactctttttctcggcaggaacgcaacccgataaagtgcaataatatgcacgccgcagtgcttccctctcttttttttctgtctgtctgtacccacgatgattgcctctcttacgcgtaccaatcttttacatacaccaacagggggagtggtgggttggctctctctttttctcggcggcaattatcacactcgtgtttcttttccccggagatgcaagaggtgtttgaattgcggcaagagaattcgaagggagagtgagagagaggagacttactcaactacctttataggtttcccgtcttttggagttgcaggagagtggtggatgtatttatcctcctcctgcagttctttggcaccgctgccgccgccgagcttcctccgtgtgagcatacctgcaccgcttgccccccaagtgcatagcatgagggaacttataggtggttgggagcagggttagtgtgttaggcttaccaccgcgttctcatagagaggggggacatacgctcttgctgagggtgcttctcctcttagacaggcttccgggttgtgatatccccggctctaatatttgttatacagtgtcagtttaaggggttgggagaaggcaggcaggcagacgtacttcggcccaacttgacgagtaaaagaccacgtctgcctcggctgcgagggaggttaggccttcccggttgggcttttcgcattcgacgctgattgtggtggtgttgggtgggaggtgggtgcggatgtagtggatgcattggagggttgtggatgggattcggccctgacagagagaaacagtcaacgaccttccatggctggtgtccctttttttctttttggaggtatgtatctacctcgaagtgaaaccaccagctgtcctcctcctccttggagttggacagtagtagcgtatccaggatacgctcgaactcgtcgggtgtcatctcgggcaggtcgttgtagttgacgacggttctgctgccggtctcgaggctgcggatgatgtagctgcttacggactcggtgtgcccctcgcggtggatgcatggtgagaagttgatcttggtggagccggggccgaaggaggagtgtatcttcgcgatagcgggggaggtttgggctgggagggtggatatcaggtgggttttgatgttggcttggtctgatggggagaatagatggtggaggacctcgagagtgttggggcagttgcctcctcggcggacttggagggaggaggctcgttgtttggcgtcttcgggtgggtaggctgggacgctggggggggggggagggtgttagcgggtgtcattcagagacatcatcatggagtgttgaagatgggaaccaagtctttgcatctcatcccagggctcctcaaagaagatatcttcttcttgaaagatgtcgagagctcacaaccgcccccgttcatcattcattcaccacttgtaagtccacacaaagcaagttcatgagtaagataagtaaacatgcactcacgtaagaatcgtgtccaaggcgcaagccccagtgagcacgagatgtttcatttttttgtgtcaaaataacacgctgcttttccttcagaaatcaattgcgttattagatggatgcaaaaaacaaaactcgatataaatatatactttcatctgttccatggtttcagttctgtccccaattatacccaaaccattatcttcactccacaagtgagggggttgcttcctcaccgaaccacactatcaccatgtaggcgtaaatgtttgcttttagctttggctttttttcttgttctcgagtgaatttggagtcttggtgccaatgagacaatggcaaagtggtccagaccggtcggtggtttggacaaaggtggtcaagtatggggtaggtaggtatctaccccaccatgacgcaaggcggggagcaacccgcaaggtacattgctgtttgggggaggggtgtcttgtcgtcaccatcagatttcagatcggggatgtagtaggtgatgcgctgactgactgactgccccataaaacataataacgagtttcttatttttttgcgcaaaaaaggttgaggatatcgtcaacattacacacgattgactggctgagaaaagatggcggaacgggacctgatactaccaaaacgggtttcgtttgatgatacgcggcaacatgagagctcgagtgatgatggggatgctgttgaggtttgtttcttttttttcctcccccccccgttctcaagctgacaacaacaacaacaacaacaacaacaacaacaagctgattgttatatttgtgagaaaaaggtctccttcgacccatcaaacccctaccgtcgaaaatcctccctcgtcacctcctcccgctctcacatctccccgggtgttatccagcgcatccaccaacagcaacagtctaatcctaaccatagacgcccctgccgacaacaatcaaagccggaatgcctagttcatcaatttctcgaatcccacaaactcaaccttgacgacacggcaccacagccagcagcggacgaggatgtagaggtggaggatatctcctcttcgtctgggctgaatgaagtggtcgactccaaaaccacaatcccagttaataaaccccccaagcgacgcccacaaccacaaccctcccccgaggcaaagtgccaactcttatccgccaccgaagacgacgagcccgccactgacgaagggcagccagaccagacgatatggcagagggagatgttggctatgccgaggactacttcctctttatcactttccctctcctcccctaatcctgaggacaatcacgagttcctcaactcgaggctgctgacgaaaaagcaattgtcggatatggcctggggggtgaggcagctgtctaggagactggggtctgtccgcctgaagttcaaaatcaagaatgtttttctcttgacaaagatttatgacaaggatctggtggataagacgagggagttggtgaagtggctgcttgatgaggagcacaggggggagaggtatgtcgtttttgtggattctgcgttggaacagaataagaggtttgacaaggaggggttgctgagggagattgctggggacagaaaagaggatgggggacgtgagggggcggttgaaggttttggaatgaggacaattagcgaccgaaggccaatattttttaatttatggaatacacggcagggggctcggaccaagggggggacatgcgggggatggannnnnnnnnnnnnnnnnnnnnnnnnnnnnnnnnnnnnnnnnnnnnnnnnnnnnnnnnnnnnnnnnnnnnnnnnnnnnnnnnnnnnnnnnnnnnnnnnnnnnnnnnnnnnnnnnnnnnnnnnnnnnnnnnnnnnnnnnnnnnnnnnnnnnnccgccggtgctgtcttttgcgttgggagtctgggttcctgacaaagtttgactttgaggatcatgaggagatattgggaggcgcgtttggggagggggtgacggttagtttgaggttgaggtttgaggggacggtgatgaggagtattccgcggaggcagataaccgagggggaggatggggaggaggaaggggagagggatttggtggaggagctgattggggaggagaaggatgatgagaggacgcataggccggatgggacgtgggaggtgctgaacgagctggtggtggatcgggggccgaatcctagtatgtatcttctctttggggctcaggacatgttgtgtatgctaacgggagaaaagcaatgtccaacattgaaatatttggcgacgacgagcacttcacctctgtctctgcggacggggtgtgtgtttccacacctacgggttcgacagcgtacaacctcgcggcaggggggtcgctttgccaccctgagaatcccgtcatgttggtcacgcccatttgtgctcatacactgtcttttaggccgattatcctgcctgatacgattgtgctcaggataggggtgccgtttgatgcccggacgagctcctgggcgagctttgatgggcgggagagggtggagctgaggccgggggattacgtgacgattagtgcgagcaggttcccctttgcgtgcgtgcagcctcatagaccgcatgggaggcggtcgggggattggatcaacagcatcagtgccaagttggggtggaatacgaggcaggcgaggcagaagccgatgaaggggtgggagggttcttagagggctcttggagaaacctagagagggcttttcacagagagattggactggcgtttgcgtggtaggtgatctttgacatatctcaagacactgattccaagacggtgtaaggagatgggaaaagtggattctagcgaggcgttagggtgatcagcgagcctagcggggatatatcaatgatgtaacaagtaatgagaatgtcttaaaaacaaacgcagttgatgatagagatggaaggtgtaatgttggagatgatgtcaatgtgtgagagcgcacgggccatgtggtgtttgtcactcgttgcctacactcagtctaccggtaaccttcttcttcagcaacacaatctacaattcagctttgataccgacatcttcgaaatctgtccctctcaggaaacccatatctccatttctcagtcgaaaacgggtttgcctgaatagaaccggtgacagtgacaatggagtcagcagcaaccagcaaaacagcctccttctccctgcccctcccacactccctcgacaacagaatctatgtcagactgtcactcaagtccaaagccctggtggtgtttttgacgacggctacgtctgaggaggcgggccaggctacaccgttggggtcgtttgtttatgctttgcctgatgtatttttttttctttttttcttttccgttactctacaacatacacttactaacttggagacagcgatacaacccctcacaacccctctcaacagcactctgcacggtggaaccgacgctagagttcacgacgaggatggcgaggctgctggtgaggaagatggggaatgagaggccggtgtatgtggggaattcgatcagctttgcgagcacggggttgggaggggtggtggaggaggagatggaggggtttaaggctgttgtggtggggattatgggggtgttgaagaggtgggaggaggaggagggtgggcagaatggggttcgggagggggtggaggggttgagtgtttcttcttgatgggatggtctttgggggtgagaggatattaggagtgagaggctatcaggggtgagaggctatcaggggtgagaggctatcaggggtgagaggctatcagaggtgagaggctatcgggagtgagaggctagtgggaatgggcttggaacagtggcagctgatcttgtcatttcatacaactctctcataaaccattcggacatgtgtcccacgaacacagatggaaggtcatttggtctggtcttgacgctggctgatactacgacggcacggaagggtggtagctaccagagatgtgatagctccgggagcggcagtgaaatctggggtatgagcacctcttgaaacaagggcattataatttttgagaggaaaaacaaaacaagtgaaatcataacagctctcatagcttgaaatatttccagtgtctctgtctatgagtagatgtctaggtttgagagcttgatatgtgaacgttggtgagataaagcctctgatttcgagattcaaacagtactatattccaagataagtaaacaattccattatccgtcgaaaataaatatccatcttcaacaagaacggtcgcagagctctcgtgaagaacaggataataaagaaagtcgagaaaagcaggcacgctgcagcacggaaggtggcttggcgtggaggggttgccctctctggtggggcacgggcactcaaaaagtggcagaggaggagcaaaaggccagaggggcaggaacagcagggcaccggcggcgcaaacgggtgagccaccaactcgaagcagcagcatcgcattttgaaacgaggaaacttgggaagagaacactcacccgacacccggacagcatacagtgtgctgctaaccaacaataatagcccacacctcaacctgaggtatgtcagtcaaaactccatatcagatcgagcttgaagatcccacaggcctggtagaggccgggaggcggcatacgcctcgtttcgattctttctttagatagctctagtgccacttcctcagtgtcttatccgcacatggaaactttgcgaagagcaatgcggaggctaacaataacgagcttcacaccccactagcccggcatcaaaaagaataaccacaataataacacacactacttactctacacctctgctctctcttcttctctctactactattcctccaccgtactttcaacccccccaattcaacccccgccctcgcgatacacacggtcgtcgctttttccaaccagcgcatcgtcaccactgaccacagcaacccataccccgcagcccaggcgcaacaccagcgatcttacctccatcctcatcataaacaccaccaccaccattgccccccagaaaaacactcagcaggacagagtcgccgcccgccatgagctggcaaccaaaccaggagtccctcgggacactcgcgacatgtctccgggactcgctgagcggcttcaacaagaccgcccagaagcaggccgaaattgtgagttgcgatggtcgctgtggaaaaaaaaccaaaaaaaaataaaaaatattgctggcgcgcccaactgactggagattgccggcgcagatgctcacgcaagcgaaagcgagtcccgatatcaacaattacctggcattcatcttttcgagtgccactccagcgccgggcacaccggtgcagcagcccaccgaatggcatgtggtccgatctgctgccgccatcatgctcaagaacaacatcaagagcaacctcaagggaatccccgaaagcagtctccagttgatcaaactggccattcctctcggtatccaggacaccaactctcagatccgcagctttgctggcaaccttgcgaccgaaatcgtccgttgtggaggactttacagctggcctgagctcctcgaggttctgctcaagatgattggcaacgaaggaaaccagtactcgaacgaggcccaagaaggtgccatggccgccatggccaagatctgcgaagacaacaccaaggttttggaacgggagcaaaatggccagcggccgctcaacatccttctccccaaattcatcgaggctaccaagagccccctgccaaaagtccgcgctctggccctcaaggccatcaacgagttcaccccaaggaaaagccaggccatgctcaacgttatcgatacccttctccagcatttgttttatctctccgaagacaagtaccccgatgtgaggcgagaggtgtgccgcgcctttgtccggctggttgagacccggcccgacaagctgctgcctcatatcggaggtttggtcgactacatccttacccagcaaaagagcgacgacgaggagctcgccacagaggcggctgagttctggttggctgtgggcgagcacgacaatctctggcaggcccttgatccctacctcggcaagattatccccgtgcttctggaatgcatggtgtacagtcccgaggatattgctctcttgggaggcgcgtccgacgacgaagacgaggaggatcgagaagaggatatcaagccaaagtttgccaagaagaacttgaagcgcggcgctgctggtgctgaggagggtgaaagccaggaggacaacggctacgagaagatggccgaggagggtctggaggagggcgagatcgacgacgaagatgaggacgacgacggcgatgagaacccagatgagaagtggaccctccgcaagtgctctgcggcagcgctcgacgtttttgctggcgatttcggcggcaaagtcttccactcgattctcccctatctgcaaacaaacctgaagcacgaggactggccacgccgcgaagctgccgtgcttgccctcggcgccgttgccgatggctgcatgggtgttgttgtgccccatctgccggagcttgtcccctacctcatcagcctccttgaggacccggagccggtggtccgtatcatcacatgctggaccctgagccggtattcatcatgggctgcgagcctcacagacggggcccagaaacaaagttactttgagcccctcatggagggcatccttcgcaggatgttggacaagaacaagaaggtgcaagaagcgggtgcctcggccatggccacccttgaggaaaaggccggcaaacagttggaaccgtactgcgggccgatcatccagcagtttgttctatgcttcagcaaatacaaggataagaacagatgggttctctatgactgcgtccagacgctggccgagcatattggaccggttctggctcgccccgagcttgctggccagctcatgcccaccatcatcgacagatggcaaagagtaccagatcagtcgcgggaaatgttccccttgctagagtgcctatcctacatcgccatggcgctcggagatgcctttactccttatgccgagccgatcttcaacagatgtgtcaacatcattcaccaaaacctcgagcagtccatgcacgccaaaacaaatgccaactttgatcagcctgacaaggactttttggtcaccagtcttgatcttttgagcgctatcatccaggccctggacaacaccaaggcggcagagcttgttacaagaagccaaccggccttctttgagctcttgagcttctgcatggaggatccttccgacgaggtgcagcagtcggcctacgccctggttggtgactgctcaaagtatgtccccgagcagctgaggccgttcatccacaagatcttcaccatgctggtcaagaagctcgacctggacgacatcttggacgaggagattgacagcagctttagcgttgttaacaacgcctgctggagcgccggcgaggtggcgatgcagttcaaggaggagatggcgccgttcgtaccagagctgctgcggaggttcgtcgagatcatctccaatcctggtgtgcctggcggcgtggtcgagaacgccgcgatcgcgttgggcagactgggtctcttccatgccgccatcatcgcgcctcaccttcccaagtttgcgcacgagttcctcaccgtcatggacgaggtcgacacatcggaggagaaggcgactgcttttaggggattctgcaacgtcgtcgctcagaacccgcagtcgattgagaatgtgctgctggccttcttttcgtcgattgcgaggtaccaggacttgaagctgcgcaaccccatcaagcaggagttgcatgaggctttcttgagtgtaagttttcttccttgcattggttgttatgttagatgctaatgaacacgacaggtcctcaagatctaccagcaattgattccggggttcgtcgacttcctcaacaagctcccgccacaagaccagcaagcactcaagacgacatatggtctctaggatcaaggttattgccgtggcagagtctgagcgctggctgcattgtgggcttggattcaccaacggacggtgaatgtcatcggggttcgcgaagggtagattctcaccatcattgctactgctgttgctactgctctgatcgtgtattcttcatgacgagagagagatgagtggggatttaatagaaacacaatgtgtccctggcagcagctcataggtccccccattcttgtttcccgaatcatcaacccaacaacacatggcacgtttcacgaatgaaaatcatgccccccatccccttagcggaagaaacatcattacataagtagatagtccggtttttactcttttctttctttctttctttctttctttttatttttttccagctttgcggacttttcaaaaggaaagaagaaagagaaagtgtataccatacccttgcgctctttttttgatggtgtgtaatgtggagtgattgatggttttggtagtaggtaggtttctttgagattgttgatatcttgatggatttgttgcgtgtttttcttaggtaaatggtgtgtgacttttgtgattggtttttttttttttttttttttttttttttttttttgcttgtgagctggagtggggagaggatgatgagttggttacacagtgagggagttgagttgtgttcagcggaggcagagtcggggtttgtttatttccaccaagtggagagcaggtgagggaacgatgaaagagtggaagcatttgggaaagtagcgaagagggttgggagtgtcattaccgagagggtgtggacttttgaaggtggaataggagaggagggaggacactacaaagggagttgggcttgtgtggaaataggcctcatgaaaggatgggcagaggaggtggataaaacattgaaggaaaggtaatcaaaagaggaggaacattgacaaggcaaaagcatttgtcatgggtggtggacctgattggaagggtcaaaaaatggtagatggtatttttctttcctcgagtctttagataggaaacaacttagcatagcacgacaacagtagataggtatatagcgttaggtagataaaaacttttctcggtgttttgtaaatagtacatgtagttcatctactccagataatgtcccttttccctctgcgctactttccatttaggaatccaacccctttcttgttgcacatacctgagtaaataaccacctacccattcttcttgccctggagttaagacacattatccacagaggcccccgagtgatgttggtaccagaacacgccttggaaaggtactcggtgtcctaccgacctctggcagataatgactttggaggtgtctctgcaagttccacaaaccatctaccaaccttgttctgaggatggtcagccgacatgccgtccaacggtctgcttaataccaagggaagcacgacaatcgcatatcaagtggtgcaacaatatacaatatagaactacaatttcctacattcctatccccttagtattccccttacctgaaaacaaaaccaagtattatacaaaggtcaacagtaccctatcaaacaaattctatcatccggcatccggcatccggcatccctcgagtccatcacctcaaatcctgccgttgcttatcccgcttcccagaacctcatcattcgcctcatccccgccttccacgtatgcaacaacatcttctcgacaatcttcacacaagtccaggcgcagccaacggcgagagtccaggccgaatcctcatggacatagttgtgaacgactcggctacctgtgcgggtgtcggcttcgacgcctgcatcgaggtggtagaacgggcgtcgggacaaactttgtggctttctcctcctccacttctacctcaggggagtcaagtatgaggctgaaacaccagttttcacgccgaaagatggattctatgatggcggttccgctgtcttgaggaaacacagatccccgagcaggaaatacctacttgtcgccggcgggtgttcgtgctccgagaccactagcattgacgatgatgtcagctcggaactcacgcatgagtttttcttcctgtagatgaagaatctcccttgatctcacgggtcgcggagattgcttccttgaacctgacggtcttcatcaagaattccatagcggtatgagtgtctatagccggcgcctcgtgtctgtagccccatttcagcctaactgagccaagatagtttgttgcactcagggcgtcctcccattctcgaaactcgaatgtattccagtcttcaagtggaaggcttcgataaccagccttaaacttcccgcggaagtctccatacccggtgtccaggcgcgcaatagcttgcaactttctgtggtgttcgcgcgcattctcctgagtttggctgtcagccccctgcctgttatccttatgactgtgatgggaaaattgatacagtgcgatcattctggctccgaactcttccagctgacttttcttggctaagtgctcatagaacagaaagctgtgcatcgcccacaaccgagcctgcgcgggctcggggaacgcaaccgcaggagcccggttctctgacaagcgacgaccacttggggggtactcccacagagctccagcagtctgagaacacatagaaccatccttgtttgcatcctccccgtaccattctttggcagcaaccgagacacgataacccctatccagaagaatccaggctgtcatcaatccactgaccccacctccgatgatgaggaccatcttgttgttgttgttgttttcggtgaattcttgagcgagtcgattggtagcaccaatgatagaatctgcatcatctatgagtttcatccctctggtacaaacatcctcggcatttctcgaggatactttgcttccgtcgatttgaagcctcaagcaagcatcacaagccccttgggtggcacgcgtaatcctgtgggcggaactagcggcggtgcccagcagctccgcgtactcccgaaacttgcagaaaccgtaggagccatagtcattgtagtcttgtagtcactaaatataacatcattggccctggcgacgatcgacttggaaatgttggtggcggagtggtgatagtaggtagcgggcttgatcagatggtcagtgctggctccctggaaatcatccggcttggacaggagtgtttcttgttcaaactctttgatgaatgtgttgagataatccatagccatacaagccttactgtagacggtctgggtgtcctgccacaatccatgggaatcacggtcttctctggcgagctcggcatacgaaatcgagcctctggagagcgagaggacacctgtcccgtcattagatgggagtggaacttggatgatcggcatggttgctaggttggactaagtggatgaaagccgtagagtgccaatgtggggaggcgtgagttgtgatgttgaacggtgggtggttgtcgagtatgcttttatgaccgatccagatgatcatcagatacgaccaaaatagaaataaagaggttggttcgaagtttgggaggaagtcgtgaaagtttgtttgagggagaattaatgagggtgggtggtgaggttgcaggagtgactcggctcgactcttgcaaaccgttagtgattttgacgatgtgagagccagttttcgagagaaaaaaaaaaaaggttctccaggaagaatcaggcatcagtgcgaaattgttgctcaagccaacagtattgcgcaattgctctagggcttgtgggcatgtttgttccttcccaggttggaaaccagtcagtcgctctttccctgtgggagcaaagggcatgaaaacatgatccgtcaagtggaactgtgatcacacggctacctggaccgctgcagtgatacagttgatctcacagtgagaggttacaggtatcttaagatggcctttcagctaaggtcagtgatgcgtatggtgaaggacatgaaagcagacatgcgttaataacaccgcagtaagacttcgagcccagggactcacgctatgggttctttcatatatcaacccgagcccaaattcaaggctattcttattcaccgcaagatttgcgtactcaggggcgggcaagcaagtcagtaaacaaaggaatacatacatagcccaatacttgccgattctgttcaaggtgccattaagcgactcgataacccagttcttaccaataaaaacgcatctacggcaagaaatatttccagatgtatgataagaataggagatcgataaaggaagagatttcaatgttcaagacctcatcaagcttctctacaacccaactcttgacaacagaacacacctccagggcaagaacatctacatagcgagcattggaggtcaagatttctgaggaagaggttctcaactgcacagcttagagcactatcaagcatctcaatatcccagcacttacatatacacggcaggacataatctccaatgtatgccgcattggatgttcaatgaggaatatttacatcttgagggtttatccatctcacgctcccaactatcgaaaaagagggggcggatgctttcgttgagcaagccccacatatacccaacttccaacccctgtttacaacagtcatccagtgaaaaagctgcgtggcgcagcggaagcgcgccgggctcataacccggaggtcactcgatcgaaacgagtcgcagctaaatcttttggtaatatttttttctatccctaatttttttcaccctgatctcctccacacaatccgtctctctcatttctgctcattttttaagcatcacgaaattgcaaaggaactcatgttttgtccaaagtttatttctttatattattaataattagagatcctcaggcatccgcccctttccgctgtcaatgtctacgctatatcaaccatgctagtcgtcattccgtgaaagggcagaacaacaaaacatgatcagcaacatgatagcagggcaagatggcctctctccacacccaagctaactacaacattaatcaatacagctcatcgaccacacgctataatagtgatcgctgtaccccacccttcccaagtccaccacccaatccctcaagagtatacgcccggtattttccttcccttttgctccccgctgaaaaagccaagcagagaagccaaatcaaaacaaaaaatccaacaagacgccattccaatgcagatcctgaacaccgcaaaaccaaaaaggccgtgtacagaaatgttcccttatggttccctcccaaaaggaaatacaagattaatagccagagaccacacatacacacacacagagagagagattaaaacccttcccaaaacgataaacagagtccaaaaaaaagccaaaacaacagatgctatgcagttgggtatcaggatccaaaaccaaaatgccaaaaaaggagtgtgtgcctatgccgattatatgcagggttcgtaaaaggagtgtctaagttgggtatcaaatccgttcgatccggtaaaagtaaaggaatgtctatagttcgatgttgctggaccagccgggacaaaggagcgtcggtaaatatgtgtatcgtaaggagcgtcgtgcatgaaaaatgcaagtattaggtaagtttcgttgcagtcgtaaaggagcgtcgtgtgcattgagaaaaatgccgtgggataagctgcgttgtgaagatcaaggttgtgatcgccaaaggagtgtcgtgtacatttgcgtctgtgttgaagcgtggaaaaacaagcgagagtgcgctccggaaaaaagaaaacgagaaacggaaaagcgaaagtggggataaggatgggaggttgggggcagatcatgggctacatcatctttccctttcccttgatgtcatcctgaggagccgtgagggcgggaatcacggtgttgtcgagacttggaaacctggaatgtgctgacatcactggcgtggcaagcagcggcgtgaggggtgattctggaagcggagggtattgagcgggtccgggactcagatagggcgagtgagcaaaagacgaagacggagctgacatccatggctgctggtcctcctgtggcgtgtggtctaatgttgtgctcgagtaggaaggcctggtcgtcatcttgtcaatcacctttgacttgtggatttccagaggctcctaggcccacgtggactggattggagaagaaacgaacccgacactgtagcggtggctggcaggacccatgacgggagaggcggctgagtaggggaccgtccagtttccagaatcttcgaagtcgctgtggccggcgtcgccaaagtcgccatagacgctcgagacgggactgtaggcgccgtaggggctagggatgttaagatactgctggttgccagagtgagggaacggggatgacagctgcagagggctgacagcgctgttgggaacagacaggtcctcggtgctgtagctgaatgacacgctgtctccatagaagtactctggagaagcagcgggaaccatggccggtgaaccgtcgttcatgtagaagggcggcgccgtgtactgatggaatgcgggcgtgtcaacaggatgggcccaacccatgcgggagcggaactcgtagactgtgccgagggggtgatccatgaaactgagagaggtctggcccctctccgagcagctgagacgttgatggatttcctcgataggcttgacggtaaggcttccaaagtaggctgcaccaatgtcggggaaaagacgctccatcagcaaagcggccgtgtagtagtgagcaatcacgaccaacgagttgggggagcaactgctctgctgcagcatatcgacaggaagccagaacagccaggtgcgcaacgccctaaggcgctcaaactgctggtgcaaaggctgggttaagacgatcttgcgagagcccttcatgaaggcaatgagctgcgtgatgggcttggggctctcatggctctgcttcagatggtgctcgagcttctgcagctgcttcagagtccgctggtaactgtccatgtcggcagcgcatggctggctgggctggtggtccggggtgggcgacggagggccggtagggaacgtgctgctctcggcgatgaagtcgccaaaaagggactcgtgtttccaggattccatggcatcgataatctatttcgtccgaattagtcgggcggtcgcgggggcttggcacaaccttttttactcaccgttgaggttccttgcatgagttcggtccagctcttcctgtatcgaggtcagccctggtcggttgtagcccggatagctgcagcatattgcttaccaatccgtagcttgccacgacagcacgagcgaagccgccaggatggcgtcggagttctccctcgagaagcagccgatggcttcctgaaggcggttcagcgcaatgccccggtgctcgtaggccatgttgcccaccaatgggcagtcggtcaggtgcgcaaggtgcgtggcggaaaacgccagcagcgcatgcaagacatagtcgtaggtagcaccgatctggatgattctagaaaaaaaagagaaaaggggcacttggtcagcaaggacgacatgggatggcatgtgtcaggggtccagccttacgtgggaatccgccgcgtccaaagcgtgaagccattggcattgaggctctccatctgctcgctgatggacgcaacatggtggatcagcctgagctggtccagagtcaagtcacagggtgtcggtgcaggatagatgtgcgggaatgggaacaccccggtaaccttccactggttgatctcctcctcaatctgaggggtccacatgaggtcgggcttgtcaggcgagcaagacctctcatcaggctgagtgatgtcgttgtacgggcagcggaccttgtgcttggtgcagttgcggctgaagatagagttagtcatttgtctctgaattttgagggataagccaagcgtaccattgagggaagctttcatcacatctgatgtggcggcgcttgctgtgaaggttgttagtgaaaacatgcctgactgccagcctctcgactcagcttaccaagattcacatcccttccgggacttggtgtggctccgacgaggaggaccaccaccgggaccggccattatgagagatactttggaagattatgaaaacgaaagaactgaactggctgttagcctccaagccaagatggaaaaacgagagacacctgaagccaggcggaggaggtcaagaaagggttgggagttgctgacattaatcagaacacacagtcagtgcagtgcgtcctggatgggatagcgaacgtcgtgagatgcggttggggagaggcgcacaaagtagtgtaaggctgacactatattgatgttgaaggacagcacaaggctatgtccccgcttggcgcagacctggaggcggagcttggagaagatgggtagccgaatgagtcaaaatgccgtgcgagagagagcctggttcctgagtggagatgcgtcgaggaggcaaaggctactgctgctgctacttgctgctacgtgtgatgatggtacggtaactactggtggcggtgatagagtttggtttggtttggttttcgaatcttttggagattctcttcctttccgggccgttttccttcttcttcctcttctcttggtgtccttttcttccttccctttcctcaacagcagtcagtagcgatcgtgtggttggttggttggttggttgtatgctttctagagtgtgtttttgagagagatatgctggctggatgatgatgtttcgggatattgtctcaatcctcctcttctcttcaacacaacaaaataaaaacaaaaaagaaacaagcgaatgacaggagtcgacgaggacttccttggggtgagtgcaaaaagcgaatgtgagtggtggagatgggcagcgacgagggctgattcagcgatggtgattgtatctggaagatcaaagagaggcggaggatggggccgtcggggggactgcaaagttaaatagcaccccaatgcacgtcctggctggggacaggacaggccgccctgtctgcgggctgcgggccagcacctgcccacctcctcacccaagaacacccacagcaaagcgcgcgcattgccccatcgggaaaggaagcctgccaggccaagacatcagggctacaccatgtgctggcaccccaccatctggcttccctttccagctagaccgtccatccatttaatcgctttattcgttaatgtctccccctccgtcccatctccatcacggctctaccttagctcccccagagccctctcccgaacggcgtccttgttgaaaccgacgacagcacgccccgttacccgtcaactggacctccgacgggagccaaggcccgttgctatcaaccacacctcacccactggactagacgccggggcagcggacacttgtggcggttgtcttttgttgagcaccttaattcatgccagccaagagtaagtaacttactctgtaaatcctaacccatttgccatgcctcgaatggtgcttagaaatttagaatggtgctgagaaacccattcgacctgggcccgtgcagcatctccttgtgccatcgaagcgctgtggaagctgccagcgtccagcagcaatgccgggctcatgcgagcgccgttaaccgggtatgctcttgtgtattgtttctctcccctctgtactataaaatccccaagaggcaaaagtgtgtgcagtaggtaggggccatgctcaggccatggctccccccgcccaatccatgctacgttaactcagaggtccagttgtgcgggaggatggcccagcatgacgacaggccagacggcagccggccccaatgtcagagcagtgagtgacaatgagggaagcattttttgtgggattatattagcggcgggcactaaacagacagcttacaagacggttccgccgggacaggccggagagtctgtttgaaaggaggcgatgagatgatggagagattgagtttggtcacctgccagggcaaagctgctgtgacagatgggatgctccttttgggtcgaactccgcttggtgcttgttcacaaaaccacaaaatcgtcccagcacaagtcccagtgaaagagatggcgagcctgcgaatgggagataggccggggaaatggccgtgctgactgctgctgtcgtcggtcgacactccaaagagcgctctgactagccgccatggggttagcgcccctttgcaacagaacacgaactgaggcggagcagcggcaggtcggcttgcctccttctcccttcaatattacttttgtaccctttctttccaccattggtgatgctcctttttcaggtcactcctatgttttcttgactgcttgtttgggtgtggtctgcgcagcaaatggtgaagcttttcgtcaggtgtggcccacgtggatgtctgtgaatgtccctggccgacgcctagcctaggtatagccgcggtattcgctccaaagagcaactttgacgcctcctcccccagccagtcgacctgcagcattacgtacttttcacaccccatctccgatattttgatcagagacagcagcggcatcttaccgttctcgtggcctcagtcctgtggcggggtttgattgctctaaacacaatcaatcttttctttgcttctgttttctatgagattatcagattgcaaggagggggcgggaagggcgttgttgcagcagccattgtcagccatcaccatggatgactgactgtcttcctctgtcctcgtccgccccccccccgcacccacttactcgattttggtctgtgggattcctcctgcatagttcctagcagcaagaggttgggacttgcagttacagccagtctcgtgcagcgcgcatattatgtagcgcagggccctttttgctttcatcagaagagaagtcgtctggtgtggtggcatgcgtactgcaggacgttggctttttcaatatttcacccgttctttcagtagaaaagaagcatgtaaagtctttagggaatagggaaaacaccaccatgaccacaatacccgtacgaggacttttgcagacgagcacctgtccaccacccaacgttcaacccaacctatcctggcgccaagcatccggcgaggatcatatcataggctaagaggctcttccttttggcatgcccaccagggcagcaaccattccccatttgacgctggaccggatcgcggttgacattggttctggcgggggcacttggggaggcttggggtgcacgccgtcactgtcactagcatccctcggcgcactcctcgctctgtctgatgatacctgatacagtagcgtgctgttccgatgttgggtgacccccattgccagttgagtttcaggtgcttcgtaactgggcctttgggactcgtgcccagcccacactggctgcaacgtcaactatcggttgatgcgctgatctgatttttgtgatggagaaagaagaaggtgaggagaacaaagatgacggcggagagaactgccggtttcccctgaaccccacgaaaggccgcgttgccggacgacgacggtgagcggacgactgggatgtgaagaggcaggtgtgcttccgaacccccggtttccgtgcctcgcctcggcggtgttcccctcatgaaccatcagtttgcattatgtcattgcccgatgctgtggaaagcaaaactctctcgctagtaacggtgtcgagctttcgagcttccatgaacctgggaacagcaagaagccaaaggaactttgatagctccagtttccacttcggttttcccggagcgtccgccagtcggtggaactccggttcaaaggcacgtcttgcgtcgggttagccaaagaagaaaaaaaaaaaaaaggcaaacgcctcgctccgaaagcttgcagccatcatgagcagatcagaagccagcgttagcagcgataccgcagtaataccaacgtcgatgaccctcgtctaaacacgtggacccaagaacctagacattacccaggatgacgcagcacatcgcttggaaaggtgagcgcaacgacggtgagggtggagatgggcactcggtgtcgtgcaggaccctggttcgatcgggggttatcttgttgaattgctgccctctggttggatgaaacaaccgttttctcgtgtccatttttggctgcccgtccctgccgcttctttggtccctgtccatttgaatgttttcccctcatcacacaccccttcccttcctcttgctgatgaccctttctccattctccaactttctcaatcgtcaaagtggctgtacacctcgacgcttaccggtcactttctttgttgttcatgctactgcactgcagtactaaatgatctaagcagttgttgtcccgaacattggctcggtaatgaatgggggggctaggcagcaaagactccattctctggttctctggatgaacaggccaggatccgaactttgggctgcctttaggttgttcccggcgccaagaaaacaggggacttttctcgccgggtgcacccattcaccgcctcatttttggtggtagcaaaacagcaacaatcaccaaagtcattcattcatcaaacgcctcggttttcccttttgcgcttccctcggcccccttgtccgcttccaccgcgccgtatgggtaacatcacagaactgcgaccgcgtggccccatgggttcttgattcggtaggtatctgctctttgcttgctttgaaagctcatttcattgtccgagggcaacaacagcatcgaaagatgtttgcttccttcctgatgctcgaatcccaattcccaactttttttgtggtggatggcttttcttgtttggggatagcgctgtttctaaataaaaagttaacctttttttccttctttccctcttccggcagacgtctccacactgacgttctttgcttgccacattcggccgagctgtggtccgctcgtccaatgacattgacggcacgtagatcctcgctactagcagacgaaacgacactgtagaagtaataattttctggataatacttatcaatctgtacaacgttccatgcctctacagttattcttttctctcttgttcttttatttcccaacggaaaagccgaacatttcggtctccttttgccttgatgtagcacacagacacacacacaactcagctaacaactcacaccagcttccacaatcgacgccttaccgccggcctcctctattttttttcggctcccggcagcaccgtgtgtccaaacccccggggcacgcgcggggggcttggctaggtacctattagctcactccgtcatcacgggtagtgtgttgtcgtttcttatcaatctatttgtttttagttgaccagatcagaaccaaaaaaaaccaaggaaaaagctacttccccaaacccccaacggactgggcgattggcatcgcggaattatggccgcctcctccgatccagattgcaacggttggggtgatcagcccgcatacatactataaggacattccatgcgcgctaatgacactggagaggttggagaaaacctctgctttctccaagtgatgaggaagtacctagctgaccccgcgttgatagccgattgtcctcaggcgggaccggcaataacgtttacgcgatgatcacctacttaccctaccctaccatgatatgatctgataatttatggagacccttttaccctcagctgtatgtgatcgtatggatctagatgctgagtggctgtctttttgctcttaacgcatgggcggaggaggatggatccagcggggagtcgggtcatagcttgcagggcgttggcagagtaggtaggtaattaattcccttttgtgtacctttcctaacacaacttgcagcaccaatgagaacaagaggcaggatgtatgatccctgctccctgtcgtcggatcaaggtttctggtgaacgttgaagaaaagggtagtagaggagggagataagcgaggatgggggtagtttacactgggtaggtacctaacccactactcgatcctcggtttcttttttgctgttggttttttcccgcgggttttttagcatttttttcttcctttttttctttttatttccgtggattgtgatttgacgggtttgtggttagggtggtggtgggtttggttcgctgactggctggctgcatgctgtcacagcccatttttccacactcagctccagaaaagcagcagatatggtttgccccgcggaaaggtcaggtaggtaggctgtccacattgcagtgagcgtaacttctgcagaagggtctgctgctttttcttttgctaattatagctcggtgtgcgtgcccgatctttgtgggggtggtggtggtggtggtggtggtggtgtacggaccttgaagcagccacagtggatggggagagtgccatgtgatgatttatggttctggttatgaccgggtgggtgggttttggttctcaacaagtacaccacccggagtcgtttccgaaaccagtaacgggcggtaccaatgttgagggagaagagggtgggtgggtaagaagcctaacgacaacatgatggaagtgtgactggagggtattgtcatttctccgtggtggccaacggatttgtgtcacgttgggagcctaagctgttgagggcatcacgttatctgctgtctggcacttttgctttcaacggtcgggacatttgcttgatgttgggttctccacaaccatacactcaaaacacacgatcgatgaccagtccaaacttggtcaaaggttggtgaagggtatcaccaggctggatttgcaaagcatggtattgcataaggtacccttccgacatgccccagagtcctcggcacggccttcattcgctctctctccgcctttgtctattgaacctgattaaggtttggtcgatctcatgctgtcagactccaaaatgcggtgaggatggaggccactgattaagaggcttgagacgagccagttatctttccagaaggaggatcttgttcggtgtcttatgctgtatcaccggtgaagctcaccacccgcgcatattcgggggatcggggagggtaaagagggatacagagtcaggggtaaggtgggatgcggaaggggagagccgatctgtgtcgggtgggtgctttgatggaaagggggaggcttactgccagcgttggggagcatatcgaccaagtgcaaaagaccgtccggttttgacgttgttattgatggcttccggtatggcatcgggcgtgatgctcgaccacgatggggtcaaagaggggccttggcatggccaccaccgtgttggtgttgagggtcaatcacatcatggcgagaatgatatctgacgcagggtcagaacatcctctttcactccttccatatacacagcagatcgtgtccggcacgtgccttgcttctcatgtgctcacccagctggcgaagaaacacaactatcgccccgtctggggtgtctcacatctcaggatatcatctgaacatggatcaaccacgtatctcgaatcccacaaacttaagcttcaccgaaacatgcatttgacactcccgagcggtggacgtctgggcttgcttttctggggttggctgacaacaccgttgtgttcaggagaatcatcgagaagccaacatggatgagccctgggggtgagactccaatgactattttggttctcttctagaaattaattggcttccataccagctgggactcgggcctcaaacggttgacgatgttgaagatgtctgagatgaacgccctggattggcccgagcaaagacctggggaagactccccaggaacgcttcggtggcacaacaagcctttcaggttttgttcgtggcaggcaggttcaagcttcttccccggtgttctcggcggaatattttgatcttccttggtgatatcagctcgtgttgcagagctgaagccgaaatagaggattgggctacctctcttcttcgtcatgtgcaacgttggcatgaagctcgagagctggagagccaacagatggttgttactatccccggggttgtcagcggtggagttcaggatcggacccggaagccacagccacggcctcggtacgttttttcttcttcgtatgtgctacacgatgctagtctgtgatctcaaaaaagaaaacaaaaaagcacagggcacatctcgtgagatctgctcggcaaggggatcaagatgctgattgggtgtttgttgatattggcattggcccttcatcaagtttcgtgaggctttctgcgtctcgactaggttggtgatgctcacaggaacgcttacggcggtccaggaaggtgaaagcgtcacttacaccgctctcacgcatcaactgtggtagtcttgtgtttacttctgctccagcgggccgacttgccctttcgccctgctttgtgtcgtccaacggtgatgtttgatccaaggggggcaacgggcaaggggcatcactcagctgcggtccaccggatagggatcagaatgtcagggggcaacttgccaatcagagcccaaaaagcccaaaggttcaatgcatgaaaggctgaccaatggctgacgatgccacaagatcaaaagatgcccgaaatcggccgaatatggggggatgttactcatcttcaccttgttgtcgattttttctttgcctcgggatgcgctggctctgtaacatcgccatcaatatcgaagccaacaacagctgatgggagaaaggcaaggaaggaacatgacagtgaagatgaccgcatgcatttgcctttgcatttgcataactcaatccagttcacaataggcaggcgagttgctctttcctggcctggcccccccaacttcagattcttgtcagtggtgctttcccaaagtgtcatcccgctcgagcacatgccccttccgtctgtctccctacttgaccccaacctcaaagcgaggcgcagtcgtcaaacaacccacctttttaacctaccaccaaatatgcacacaacatcgcattttattgtaaattccgtaagaaccacggaacaacaactctcagtccattcgcttcccaatcccgattcaggcacagcgcataatgtgcccgccgccgcacgtcatctctggtcggtacctgctgagcttaacagagtcctggtaaataataatcatcaaacacagcctcactcaccctcaccaacagccaaaccgctatccctcaactcctttaccgagtgacgcgtctcaactgtcaatgcccccgcaggcgacaggtccctacatgctgacgtgcatttgtcacgttgcttgttgctccccatctcatctccctcatcagaactttgttggtctgttgttggcggctgtgagtttagcatgggtaatatctaagttacacaagaatatggccgatgtaaacccatcttatcacagtcgtctacatgatcagatactacaatcctcaaacctcatgtatagaacttgtgtttattcctctctaccatcttgttgtaactcagccctctttctcgaacgccccccccccccttatcatccgatttgacactttgcgaggtttgatacctacctccattttatctaccggtccacgacgaaacgggggtactggacgggggctatcccggagtcggaaaagggaaccgaggcatgacaaagagatatgtatcaaagcttggtttctttttttttttggtgtaccggagacccgcgagacccgcgagacccggcggatgccgaattgttgtttttttgggaaacctcctcccacttcccggactacctggatgcttgtccacccgcccgccctactgccggatctcggcatgggacggagggatggtccttgagggtaagggggtccggggtgatggtagagaaagtggggatgggtgaggtaatatgaaatcatcgccggtagggagagatccccggcatcaaaacagcacatcgggagggaggctggctggttggctggcttgcttcgtttcttggaaagggaacgttaacttgggccttgaaagcatggtcagcctccctcggtttctttccggttatttcgattactggtgtacctaggctgggttcatgtatagggaaccaacagacttttgggggtttgaatagtgatccgggattgataggcagttggggatgttgtcaagggtgggtcgggggcggaaatactagggatgaggggccggttatctggttcgacacttttgtgaacgtggatatggatgggtttgggggagatcggctatctggcttgaagaacaggaagaataaagttattggtgaagaatggaactcggggcggggatctgagctaggtgttgttgttggtcatggaccatgggcatggatttcatctcggctctacggttgttctacctgccatgttcgcagtcaaggaagaggctgagctggccgggaggggagatcacggctattacggatcctttttggaacttggcggttccagtgttgggataacctcgttccttggatgtataatcaagagtactttcgcattacatctgatgatctacgaagatgagatccctggcagcctcctcagcagtccgcattggtctccgtctggactttcttggtggagtatcagagtctttcgggggagagggagtgaggtggccgatgttgagtactcactggtgctgagagatgggcgaggttgacttgaacagaagattacacggaaacccaaatggaagagcgtcatccggagtaagagtggtttgaaggccgcctcaagttctcgcaaccgaaataacagtgaatccaaggccatgatatgctagactgagaacactcttaggtatgctagagtcaattctggaaaattagtctacgaggagatctgtcggagatggttgtttctgaaaaagatccaccaaggggggacgtgaacagaaatgaggattgaaccacaaagagatctatctcgaagaaaggttcacatatgattccagctctccaaacaaggccgatctgaagatgaggcccatgtggcattgcctcttgagctgatacacatcgcaggtgttgacgatgtatttcgctcaagccctcgtgtacttattataatctacctaagatgcccatctcatacaaaaaatctccagcacaccatcgtccccggctccaaaaagtctcggccactctccagatatctcttgcaggatttagtaaaacatctacgcccccccattatagacgaaactgagtagtcacctgtctacagagatattccatcaccaaaaactactaattgttccactcccacacaaccactgatgcttgcaccttctgagactcaaatgctaggttcaactcatcagaaaccttttttccttatatcgaggttgagattgagatcgagattttggagcccggaagtgagggggataaacagcagagacaaatatctggacataagagttcatgaggatctctaggccagagcagaataggggtcagatcaaaacagaggtcagatcaaaacaaagctcagaacaaaacagagcttggaaaagatccccccaggagtaacgagtgatcagaacacaacaaagcttttttttttttttaaaaaaaaaaaagaagatcaaatctcaagagaatacaaagaggcttatcaactaataacatgatacaagaagggatccgaataaccccaagcccaaccaaccaaaagaagccaccaccagcagttctaaacactggattcatcttctccaaaagcccacccagtggtctagctgcatcaatgagtagtaactacagacccaccagcaagaggcgatgaaatccggataaaaaaagagttctgagccgtgacactaatgaactgagaaaggtcaaatctccgtgtacctgtcgtcctcacactcaggcaaacataccctttccagatccccctcatcacaagtattatcagctgtgcttgaccctaggcacctagacagcaacatctcaagaacccacagcactcaccaaccaaggtctccaaagacaccccccatagtaccacatcacacacagcagcaaagtgaacaaaaccaccgcttcattttccgctttatatttccactaaagagacccccctttcccaacccaaccgtatccctttcctcccgcccagtgtatttatctaacataaatctctcccaccctccaacaatcatagcgaaaaaacaaaccatccatgtagaagaaaaaaaaaccaaaaagggtcattccgctacccatttaatgccaacctcgcagcaaaaaaacaaggcaaaaacctgatacccacccctttcccgcactcatccccttaagcaaacctcttagccctcgcctccctcttagccctctccgccggatcctcctccctttgcggcagcttcgtcgcagcagcagcaccaccaccccccccattgcgctgctgccgaccagcaccacccggaccaccacgcacacgaccgccccgtccctgctggttacggccgttattgctgttgttccggacattggcactaggctgctgctgctgcggccgcttgttgccgccctcagcacccttaaccttgctcccatcatccttcgcctccctccccctcttcctcggcccccgctcaggcagcgcgctgtccagagccgagatctggttattagccaccccgaacttggcagccctcgccgcggccttggcctcctccgagttttcgtctagcgtgatgccgaatctggcggcgcgagcagcccgcttctctgcttccgtctgcgcgttggtcgcggctaggttcgctgagaagagaggtgcagctggggcagcggcgggttcctctgtggcggtggtctcagctggcttgtcttctttggtggaggtggtggcaggggcagcagtctcatcagccttggtttcgacaacggctggcgcatcctccgacttcttctcctctgctggcttgtcttgagtggcggcgggagcggcatcagccttcttggccatgggaggaaagtcatcgtcgtcgtagtcgatctcatcctccgccgcggcggcgggcttggtgtctagaccgagatcgagttcgatgtcagtgatgtcgaacaacatgatgaaatagaagaggaagcgcttcgaggtttggaatgcgacaagataggggctgatgcgatcgaaggaggtgatgaaggtgcgaccgcaaccgatgtgtgtgattgatcgcttgcgcaagaacagatggaaaattctcgacgcgcaatcctcaggtagaataacccatcaccgcagtcgcgatcgcattcgcagggaggggagagtaatggtaggcttaccggccttgggctccgcagcttccggggccttctgattgtcgtcctcctggagacgggcaatcaggtcggccttgttgccggtcaacggtaggctgcgctcctgaagaaccttcttcaactcggggaccttcatgctgttgtagtcggccattgtaaaaaaaaaaaaaaaaaagggggcagctggcagctgcgagtggcgcaagtaggaattgatgtgtagagttggtagtgtagggagactgttgatgcttttatcgcagtacttgatggccagagatgaaaggaagtttggtgcagggcggtgatgaagttcactgggaggctcagagggctgccgtcacgcgaaacgcgtcgctccaagtttctgcgctgctagcgctgtcaacaggggtcagtggctaattgtcggcaaacgtcacaatgtggacttgcggcttggcatcgtcgctgctattcgtacgatagagagaggatacctattgtatagctttggtgattgaacagttattcattgtcaatagacaggctttatcgtcagtagcaacactctccaactcgcaccttcctcctcatcatcagtaagccatgtcaacgcaacttctcctcctaatgccaacaggggttagggtttagccgcaacccccaagaaaccaccagcaaactgacgtcatctccaagaccatctccaagaccacctccaacaccaccacaactcagctccagaagcaaaacacaaggtgtagcaaatactcaagagtcaattctccagatgacaatgaaaacttctaacctctcaccaactgacagagaacgcaaaaaaacaaaaacactgtatgccttttgcccgtttgtttacccttcccctatgcgccatatctcgaataactcggatgcagaaaaccctcatccaccaagggaaaaaccccaagccctccttccccccttgcccaaactttgcatataacaacatgctgatgctccgggtattgcctgtagtgaataacgcggtgaaagaaaacaaaagaaacaaaaggaagccgcctccgcccattttctacaagttgaccgttttgtctttgggtatctcggctggaattcttgggaggttggtggtgccacataaccccttgaacccgttgtttgtgtagccaaaaagaaaagaaaaaaaggtctcgaatccgcaaggttgatggtatctcgtgatgtgatgtgatgtgatgtaatgcagtgtcacgacaacaaaaggcagcctcgtctgtgcgccctttcccactcccatctcccaaaccttactatttacctcccggtccttcctgatctcgccgatctcgacgacatggcgctgccgcttctgtcacgcccagctccttgcaagatggcatcctgatagcttggaatgggaggacttggtgacgagcgctgttgaatgggccgaccctgagcattgctagtgctcctcgctcgaacagtagccagggagccattacggctcctgctgatgttgatcaatggccggttctcatcgtcactgtcatcgcgctcggcatccgagtgttccgggctcgtgtactccggtgggggcggatggttggggtcgtgaacaccaaggcctgcattttgcgccccctcctcgttgtgtgtttcagctgccgcggcgctgctaggctctccggcgtcttctgtaggaaccaaatgggaaagggagatatcggttgggctgcgctggggccctgggctggtgggtgggagaactctgaagttaccagatctcgtacgggtatgaccgggatccaaaccgggtccgccttgcctagggtaaagctgcacagactggcttccgccatgaccacgagtgtatgaccctgtgtatccgtccttccgtcccgtttcgagaagaatgctgccttgctcagagccgtatggcggaggtggtgccagtgagcccgtcatgggggccagaccccacttcttcacgttggcctcgatgaaaacaaatccggcctggccaaagttgacgtgtacgatgcatgggccattcgctccgaccgaggggaagaagttttgcgtcttcatgccatgggcggcttcttccagcttcttcccgtttcttgtgaagaatatagcgccggtccgaggtcggtacccaacgccaataacgtcaccttgaacgatttgggggccgtagtggttgcccttgaacggttggttgtagcggcgagaaccattggaaagataggcaacagagtgtttgtggaagcctagcagatcagttagcgagatctgaacgcaaacgtcaagagagagaggtctctatcctacctggtaaccggaacagcggatagggtttcgtgcacatgccgatgctgaccagagtattgtctggcttctcgtagatcttggcttcccagtagtagacttcgttctgttttggtaccggcagattgctcatgacggtgcattccgaatcgaagaactcaatctccgtacgggcttcaacaaagcagttggcaatctccagctccggctcaaactcccaagcagaaacacccttctcctgaatagccagatactgcgatagcgagatgtccgtctgcacagactcgggggggttggcagcaatgaaggctagaataatcaatgtcagcgttcggatccggccttgctggatagaaaatacgttagggccgggcacgtaccctttgctctcaaatattccgtcctctgcatgtcatccatcgtctccaatgcctcggcctcctcccgtgcaaacgcctgctcgtcatcgtactcgccgggacgaccgatccggtcgaggaagatgcggcccgaggatgtgtacttgaaatagtagatgatgagaaacacgcagagtatcacgatggccgacccgaacgacgacagcaggccgatgatgatgccattcggggccgggtttggattcgaggggtagtgatcgtaacgatccattgtgtggaaagagtggcggttgttggtcatgttggatatcacctctcacgcactgcgaacaaccgattgccggcaatcacggctggaccacatgcacccgcaacaccctttcagataaggccaactctggctctccttgatgtccacagttgtcctgttctgttctgtttctgtccctaatcgttccgctcaatcccagcgggcgagcgacctgtagcgaactacccaagaaccaggcgtcggcgaatgaaagagagacgggcgggccgttcgagtgatgatgtcgcagcgcagcggtcgatggctttttgcggtcgacgcggggttcgttggaaaaagcagtagacttttttgcccggctgcacaaggcgatggatggatggatggatggatggatggatggatagatcaggaacgtttggggtgtcacgttgactttggcgcaggacgaacgccgagatgacgaatgacgaaagcaggccgataagcaacggggaagtggaatcgaggcactgcccactcgtcgtcgaggttgcgcaaggggtgggtatacggcaaaagacaaacgcaagaaacgaaaaaaaaaaaagataaaaagaagaaaagagacagacgagaacaagttcgtctgcgtatgttgagactggagaaaggaccagttcagatcagttgacccaagacctgaggaggagtggtgggagaaaagatggagtttgtgaatgatgatggatggattggatggggctggcccggaacaagtcaccacaccaaaaggctgggtttacctgccacagtctctggcgccaagagggacgtgggtgttggcgcgctatcaggcagccgcctttccccctcggccagctgattaggcgctatcaggtggcggggaactcggcaagcattggagggtggtgacgctgaggggttgcctagggggtctgtcccctcttttcgctgatgtgtcttgcagtggttttgcagttgggtatctaaatccaaaccacaaggtctctgcagtatctctcttttgaaggagaaatggagtcgtcgaacgaatgcataaactcagcagaccctgcgccgccccaagtctctgaaacctgagacagcgcctgaatgcggcgggtgcgcgttggcgagggaccatctgccctggccgagtttcaaagccgctgctgccctgtgctcggtgccgtgctcactgatgatgtaaaccacaaccacccacctgtttcgccagcgcgcaattcggaccatcctcttgggccggccgttgttggtagtctgatggatagccaggaagccacgtggaggttgcaggttgcgacagatggatgcatcgaaatagaacggccaacctacaagagccaccgcaaacattgagactttgtgatgctcacgcccgctctatgtcccgccgccttcgagtcctaaggggaattggacactgaacaaaaggactggaatggaatccccatggaacacccaaccgagacaattttctggaagcccaaaaaagacggtccgctctcagacagccgggtcctggaatgccggaaacgaacgtctctcgggcctcatggatcggacaacctccgaaccggccatcgatcgacacagggatgaatctcatcttacgataacgtctgaggccagggtcaaagtctatgtaatgacatttattgatctgatccgtcatgataaactctacataatcccaacatgaatgacaggcttgcttcgcaagtaggtaaaatagaccgccaccggtgagataaacaaaataaacaaacgcctgctctcatagccggtccaatcctgttccaaacatcatccaacatcatctcgtccctccatccgtgggtcccaaatccatcccttcctgaacaactcttaatcaacgctgctggtatcatcccgtctagtcctctctctctcccttctggctccggcaccaccgcgtctcttcctcttgtcctcggcatacgcaaagtcgctcacggaagaggcaatggggatgtggtgagagtgcgtgtagaccttggtgcccgagtcgtcagtgctggcagtagcggcgctgacctcactctgagcccatccacccggcatgctgctcgaaacctcactcggtggcggcctaggtctggacttggacctagccctcgtgtaatcagagtaggtgttcgccgaagtgccctcacccgcaatctcattcccctcatcaatcctcctcagcgcaaccgcctcctccgctccggcagtaaagctgaaatctctcttaatcctcctcgactccctcggctgcagcgccttctcctgcgcagccgcccgtctcccctcctccctcaacttcctcgcctcggccttgatcttctcattctccctcacagcattcttgtcggcagtgctgtaaacctttctgatacccctctccttcttctcctccttcttcggcgtcctctgctgtccagccatcaagccttcggtaacctcgctgcccccatcgactgtgctctccgccatacccctcccactcgggctcacctccgaccaagaaggattcgtgctcccatcccactcactcccatccgcctcccgattaatcccccccaccctcgccgccttctcatgtctatacatcctcagctgctcctcagccaacctctccgcctcctcatccaccacctccccatccgtcccaaccttcctcctcgacttcctctccttctcccgcctcttatcctccctcttcctctccttctccctctccttctgctccctcttcatccttctcttctccctccccgagaaatccgacacccccccggtaatgcccgtgatgcccgtcgtggccgaaacaacagtagtcaaatcatcatcccttcccccgccatccctcgtcacccccgtaacaacagtcctatcatccacatccttgtacacactcccgccgcccaaaacagtggacgcagtcacatcgctgtaaaccgtaccgttaggcccgattttaggacgccgaagaacggtagacttgtaatcctcccaatccccctccttgaagtaaaaccccccgttcttggcccagaagaagaaccaaatcccgacgatgacgaacccggcgcctagaagaccgaacacggcgaagatggcgttgttgttgacctcgttggggtggatcacgccggggtgggtgaccttgacggcggggtcgtctttggtgtcgtcgccgtcgcgggcgaggaggatggtgtgggcggctagggggccgagggattggatgtcggaggggaggtgacggcggaggagggtgaggattgttggtgccatggtgactatttattgactggaacgtgatgatgatgtcaagcctgatggctgaccggctaaaggttgtgtgtggtcaagtctcggatgaggttgggttggggttgtgaaggtgaaaagtcgctggtatgttttgtcgacaacaacctcccccactcaaaaatccacgatcgtccaaaaaaaaaccaaaaaaaaacagtcgataaattagcagattccgtgggatgtgtgtgcaactgcaaatgcaggagagagaaaggtgcagcgaaaagtgggtgttgttggtttaatcgcacacttgcgcaccccggttaacccagaaacggaggaggttggggttgcagctttccttccttccttcccagccacccagccttccaactccactgaaaatcaatccaagcctcttccttgcagaacacacaatcaagtttcagccttatttcttcgtcatcatcatcaaaatcaccagggaaaccacccttcctttcttcaacttttatgcaatctgcatatctgccatgccgccctgtcaataacctgtgtttgaactaaagtaaacaatcctcacccagcaaccacccacacaacctcaccccctccaaccctccaaccaatcccaccccgcatcctcgccaagccccatcttccttgacactcggtcacaacccactcagctggttcctcccaccccacacagtgtccgccttttcccaccgtccctctcactgtcctcccccctcaacaccaaccaccaatctccaagctgatatcaacccgcatgttataggtcaataacctcctcatgccgtgtctctatcccttctcccgagcactcccggcttgctgcaagaaagaaattaattggccatgtttaatttgggggctcatgcctctatccccccccccagtgaacgatgtctgacagttgtcctgactacctgaccttctcatccgcatagcaacgcgacctatttggaattttcacactccgtttcgtcctactggtacctaactggcagtacggataatagtatgatgatccacaatcatcccctttttataatcaggcacagccaaacgtgttcggccccaaaaggggggtaaaccaaactctcattggcaacacgtgtacaacgccaggtccgagagtggcagagaggcagtgtcgatctgcagattttacaacaaggtagcggcgaatctaatttcttccaaaaatcatgagatcagcatcccaattgcacagcatggatacccctcatcattcaattctctctttcattgttaactctccaaaaacaaaggttaatgatatcaatctggcttgaaacggcttgctcaaggaaaataataatgagatggaaacttcagaattagccccggtagagaaaacaaagaaaacaccctatacagtttcttcccaaaaagcaaaaaaaaaaaagcctcccgatattaaaccttaaccctgtgcccctttcaaagtttccaaggtccataccccctccccttgatcaaaagggagcatgaaaccacatcatagtacatgacaatatctttgagccaacaacgcaaagactcaacttctagagtcaccaccctgccgcaagccgccatggtattttagtagcacaggattaaacatggacataaaaagtccccaagaagaaaacagaatggtgtaaggaaaggttccccatcatgaatttctctgcaaacttgtccaccaaaaggaacgagggggtataaagcccgcgcccaaacagttaacccaactgagaagagtatccaaaaaagaaataaataaataaaaaagcaaaaacgctcgctcatatttcgccccagtgaaacaagagttatgcacacataaacaaaaacatcatcgtcatcgtcatcatccttttgttggggttcatcatcttcatcatcttggatcgtctcggggtcgccatttggttggccgttggccgctccaggcgttccaacaggccgtttaccgaccaaagtagtggtcgtcaggtcgggaggaggagtacgaggtagggtattggggatagggtgggatggagggggcgtagtcgtcagcaccgacgtactcatattcggggctggcagcatcggggtaggcgggataagccggggcacgaggaatggacctggcgcgggaggctccgcgggtgcgtggccggacagggaaatcgactcgggttcggcggtcatcgaggtcaacccgggtgtggcggtcatcgtggtcgccatagctcgcgtcgctaccaccgcctcggtagcctagcgtagcaccgttcttagtgatgttgatctcggcgccatcatggcattccatttcggcaccgccaattttgagcgtcgtattaccctttaccctgatggtgaagtcttcgtcgtgagcactggtgtgcgtggtcctcgtcgtgtatgactgtcggtaatcgctctcgtcgcggctgcctgagcttctgctgcttcctccgtttcgggcctttgcgagagtttcagcggttagcgggagcggggacccgcccatgagttcttcctgataacgggtggctgaacgaacttgatcctcgtatgcgctgctggaagccgccgattcgccaaagtatgagctccgtcgcaaatgcttcccgtaaggctccaccggcattgggttgtagtcgtagtcgccgtacgcctcgtccgccagtccgctgctcattctaggtggcttgggacggaaggctaggttggtgctgtggccggcgttgttgtaatcggcagggcccatgggggagaggttaaagaggtcatcctcggttcgttcaatatcatcatagagggttcgccgcgagattggcgtagagggcgcagggggttggaacccactgcttgggagtggcctggcagattggggtctgcgaggaggtggcggcatcatgcgcttatcgtccgtctcaaccttggacatcctcctgttggtggatggacgccgagctaattgtttgctgggaggcgcttgtggctcttcccactcgttaccatattcaatggcaggtggctgctgaaggcgataccaatcgctgactgtagccgggtgtagctgccgaagcgagactcaagtagccgcgaaaagtactctggtcctggtccgttcatgaccacaggggacgatcctagttgaagataaggaatctgcatgggcgctgacatgggtgccggtggtgggggggggccgggagggggaggaccgctccattgaggtgggttcggaagaggtggtggcgcaaagcccgagttcatctgcgggcctggtgtctggctgtaatacctgttctggtgggttaaaggtggtctcgaaggtgagctgccataataggcactggtcggtctcgtggtcttggagcggggacgagtggcagcaggcgccggggcaggtgctggctcattgacgccgaaatattgcgcatcgtgtgcgtctacagacttgcgtgagtaacgggcgtcgggcggcgccgtcctcgtgggcttcagagcaggtcttgaagtcatgagtgcttttttgctggccgaagtagacttatccctgtgagtgctgggcttcttggtagaatctctctctcttcgagggagcgtcgagtccgagtcggtgtgggcgttgatgggcgaggtctcgctcttcctgctcttttctctccggacacgtccggtgtttgctggctgcttgatgggactgcctggggcacaagatgtagcgtagcgtgcggtgccttcaaaaacagttccggcgtcgtcggcgtcctcgacgcatgcagcagatggtcgattcctcccagacattgccgatacgagccccccgctcgtctgcaggcgggctgactccaagtcagatggttgagtttggtgttgttgcgagaggcaacgatgcctcgacaaagaggccggccagtctcgagtggatgggattgtgggttgatgtggcaggttgggcagcggcggtaattcgagcgttgaggacaaggcggtttgtggggtgcgagggcagcgaataccagtgacaaagtgatcgacttcggatggcaggatggtaaattcagcggtggtggcagaaaagtcgctcgcctagagacagaaaatgggatgggttgtcctaaggaaacaaaaaaaggtggaggaacgggacagtgacgagttttattcactgcgggggggtatgctgtgagtggagggcggcaaggaagaccgctgtctcgcttgcctggagcaggctctggggttcgctggggattgggggagagccactgacaaccacaggaggaccagacgggagacgacaggggtgtgagaatcccccagacaccaaaagaccaagaccacggtggggacggcacctgaggaggggcaccccagacaagaattatcgataacaagtcgagacgagacgagacgatgcgataccgagggagcaaacactctcctccgttccgttatcgaccaggtgacggcttgacacacacacacacacacacacacacacacctgttttggtcgcaccagatatcttttgtgttgatgttggtgttgatatgctggtcaatgctagttgaatgctgatcctgattctgaggcggatgattgtcgtgccctgccctccactgccctgcccagcggcttggatacgttgcccgatgggtccaatgcttttttttctctttctttttttttgtcctcctgatcgtgggggggaaggctatggacggcctcaccttggagctccagaactacggattctggcttgagcctccaagacttcagatgctgcgtgtgtctcgcagattacaggcagatcgtctggcagactcgggcagatgcgggacacggagcaacagtgcccggcgcaacacaagactctgcttctgctgaagagctatcaaacgcgatgcgatgtcgctggttgggatagttgggcaaagacgacgggatacttgtgctctgtggcgaaccaatgagagcctgcaagtcgcttgcacgtatggcaacttgggagcatgtgtgtggtggactgcttgtgccagtgtgcgtaaggcctcaactgagtgggtttttttttttcggcggggacccttctcagcggctgccgagacacaatcgtgacgaagctgagcactcgtttcgcgcctttaatgcccgatactgttttgggcagcgattgagaggcacggccgagtgccggtctcgcagtgatcaatcagcgttgaacttctgtcctggatggacatcaaaaacaggctgtgccaggcctaagcgatatctagccgtctgatcatgagcttttggcagaaatgcgatgaagactcgagaatgcgtgcgaaaaagaggatcaactcggttgagccgcggaccaccgaacgatgctctcttcatgcagagagagagaaaaatgcgaaaggcaaccaccgttcatccctaggcaacggcaggcaggtcgccagctcacacaccatttctgtcaacgcttgcgcgggtttcgacccttattattgggagccgtcgggcctggaatggagaatgctgcaggccggtgccgcctgacgcctctcatagggcaggactgcgacgagcgcccccaacaatcttctacttcgttatctgtgtcttggtcttgccgggtccgcatttttggagtcaccggccaacttcaattatatgtactgcacccgtatttcgatatcaaatcttcaagacacggactggcaacgtcgtgatcggagcacacttggcgtatggcaagatgcttttcaggaaccgatacggcctctggtctggtgactggttccgtcaaacattctcttgattgcttactcgtctcgccagcggaccgtccgacgacaattcagccgttcctttccacagccatgtcgtggaagcatccagcagacgatcgtctcatgcggcatattttgcaaagagccgcaattcaataggtcgaactgctgcgggtgaaactgttgccctccacatatataccaaggaacagaccagaaccgcgctcgcatataaaagtgtgttttgattttgatttcgcctttgcctcattggtgcttcgagcatacagatgagcatcgggtgcccaatgatcacgttcttataccctcctcaaaagatgctcgaccgaatgttgggggttgcttctccacagaaatcggtatcgtcgacgaaacagaggacagccgcgccggaccttttcggatttgattggacggcttctttgtaacaatggctgttcccaccgtcgcaaatgcgcgagaagcgcgagtatctgcacatcatgccgtatcgccatgctcaggcgatcccgtccacttgggtgccgttgaacgggcatccacagcggattatcggctgtttcgtcaagcttttcgagaacacaggttcccagtctcatttccatctccctccagatgtgagtcaatttgggcagtgggaggatggccaagccaatccaaagacggactggtccggatactccgcatccaatgcattgaaagcaggatgcatgcagggggtcctacagaaagtcattgacctcttgggcaacgctggcgccatttcctcagatagactccatgaagcctgcacgcaactctctgacgcaagcgttcgagacgatcccgtgacacaccggccaatgcagcttctaggtatgtgacgtgagagctcatgaactatcccagatgtaaaagaaagccagcgtcttcctctgggcttggaaggccctccgaaaagcacgctgccgagcacaaccggaagtcaggtccgtttggggaccgaaagatagcagcctgaccggagctactccggaatcctgtccatgccgccgtttgttgagggcccaagatcgaccgattgccgcatgccctatctttgctgaatcttcacagttcgagggcgagaactttttcatgcatttccggaggggcaccttttgtgaatccttagacaatcaccatcatcgtgcattgaaaatcgatggcaacccggacctctgcggcgagttgattcattcgactcctcaccgccttttggttctggtctccctctctcccggcactatatcctgcatcaaagtatcgacgccaccgttccatcgctgtgcgcactcccaccagccgaaccttttgagccggcagctaatgacatgaagagtgagggggtggctgatcctagggaggcttagatcgatcagtgatggcaagcacttgtccttccaaccacgaagctgagacatccgggtatactcagcgagtgccgtcggcaatgtaggtcctctctctgtctcacatggccgagtctgctcgtgtccttggccggctgtctgaagcaaagacgggccgtcacgtcactcggctcgatcccgatgcaaatccagcgtggggtgcaggcgacatacagctctgggtctcaggcgcatgactctcaggtcgatatcaactccatgtcggccaccacagctctatgatccgagaggtagaccatgtcatcgaagcgatttggcagaatcccaaagttgcgactagttaactgttgcgattcccgaacaaaaagaaagtcaatcctcttgggcgtctcttctggctctccaaaagaggtgtaagtgatatcctggttgccgtaccgatcatcttgttgcacaagctgagagatatccgtcatgccggaatcaggggcggccaacaccttgtaggctccatcacttggtgtgctgttgaaatcgccgccgagaaaagctggtacttgtgtccctcgactggccgaggccgtccatgttcgagatatctccagtagcagcttggcgctttcttcccgagctacttttccgcgatggtcgaaatgagtactcatgactaccacacgagctccagtatccttgtgccggaataatcccacggtaacaactcgttccaaggcagcatcccaacctttggacgggagatcaggtgtcttggaaagccaataagtcttttggcgttcgcattcccaatgatccactcggaaaaagatgggagagaattcgccagcctgtttaccatcctcccggccttggccgatatgacgccaggcattccccagcctgtcctggatatccgtgagctgagaataaagaacttcctggagacatatgaagggcgagtcttgacccgaggtgatgaacttcaactgtgagcagagctttggacagcgaatagaccatggctcctcacccggaacgggggtcttggtggcatatcgaacattgaaagtaatgagacgaatcggaagggggccgcgtgtggcgatgccggttgaattggtggtgcccatcaccactgcctagagcaaattcctggaactgatgcaagcggtcctgaatgagtgagtggttgcctagaaggaacgggctcttcactgaagaggcgtaaaagcgataatacgatagtgaataaaagagatgaatgaagattgagtgaaattgaagccgaatcgatagccgtctggaagctgaaggctacgttgtcagagcatgttcacagttgaactttgagaaagaaacgcgtcgtggaaaagagacaaggccaacagtgacaggcagctgtcgcgtcaagctttgtactacgtcattctagataagctcttattatgtaagcaagaaccttgcaaccatctgacctcaagtcctcgaccgccgatgacctttttggtcacaggccaccaaattcagaaaccacggcatttatttgcacgaccattttgagctgattacgtgcttcgatcgtgtaactttgacttctacatcccgtatttccaacagaccgagatctccaagtggaaaagtgcgggaaactgcagtgtaatgcaaagtgcagaacttcttgcagcgttcctgcttcgaggctgacctcccacgagctgtgactcgtcagcatttgcccgtcgtctcgatctttttttcttcgatcgattcatgggaaaagaaccttgatgatttgctccgatcatctgccccccaaagggtcttggcagagatcctgcaggtacgttctgcctcaccttcatcgcccccctcatcttgtatgagacgatcagaagcctgtatatcctcttccaaatactacatactatcatcctgacgggatttagaaaatcaccggtgttctcggcatctttctgatatctccgggagggtgtgctcgctggacaatcagatatcgaatcccactactaacctggtcggtgtctcagctcagccggctgagttgtatgtcacaagccaatctatgacaaccttcacgaaagtaattccccgcctgctcgtaatctactttggcatttccaaggcccaaatcccatacatgccggtttcgagtcaccattcacgccattctcgaaatgttccaagtttaatcaacccacatggtgatccccgtgatggtccgcatagtcttggtgtctctgaacctctcaccaaaatcggcaatcttcttcagactagccatggttaattcaccctaggccgcgaaaggcgcagccacaccttagagcgaatgggcgaatgaccccactcacacacggccatcggccgagttcgaagttggtgtgtatggcatcctgtgggtggccgtcaagaaaacagacaggtcacttttcactccacaaggcagcatctaagcggtaatcatcactagggaactttgaccggtgactctgcgtatacccgaccatccatggcttttttttgttattatgtctctcatggaagatggtgggcatgtaaggaacaccagctgcggtcatttggacttttgggatagtatatatcaactgcggcgttgccgccttttggggacccatccactcatctctctcttgtttcgttcactctctgttgatcgagttccacggcagttggggacagacacacagaccgtctgtgtgcggcctctctcgtttcgggaagtctattatttgataggacatcgactcgtgtctttctaagccagtcgacacacaagggcggctcgacggcaaaaacgaagaatctcatgctttgatcgggtcagacgaatacgcggccgggggtatatatctaccctcatttgagacatcatgtcttcctcccgatactcgacgacaaccagctcaaccaacccatcaaaatactcctattctccagcagcacagtctagctattcctcttcccgcccaggtcaacgcccctctccattccaaccaccctcccaaccagccctcaaaccaacacacctctcctcccccttgccagacgacaacgacgacgacttctccctcacaatgccaggcatcgatcccctctccttcttcctcacccccccaaccccctcggccccctacccacaggacgacgacacggccatgctcgactttgactactttgactactcggccggcatcgacgattcttcttcggccgacgttaggagcgtcagcccctccagcctagcaggcttctcccgccctgacggcccgcgcccccctactccccctcgggtctcctcccctgctgtgagcacccccgatttggagtttgactacgggagcttgggagccagcccggaaggtgacacgctcatggaggaatactaccgccatcggatgggcggttacgggggtgttccgcttttgttgaaggactttaccaatgctgctggggggaacaagaagagggggaagtttaccaaggggagtgggggggagaggcatgcggggcatcaccatgtctggagggagccgagtccggatgtttggagtattgaggaggatccgagggaggaggaaacgggggtggtggatgttaagaagaagggaaaggggactactagggggggtgggaaggggaagatggtgaagagggtgaggtttgttttgcctggggaggaggagggggtttactgatttgttttttttttgagtaaacatgtatactgcatcttttggtggtttgttgttgcattttgagatgcatttttcttttctttttttttcttttcttttttttttctttttcttttttctttctttttttttttggaaatctttggaataggattacccccttacttagaatattgggtttgcattaggaggatttccttgagtgcttgtatggaggttatctgttgcattgtgtccggtttttgaacttccttggttgtctactgcatctcatccggtttcatttttctcctgctttttcctaaccgcatgtttggtgttggctggctctttggctcttcggggtaagggattctcatcatcatccccgttgtaattgcattgatcatcatcataggaggatacattcatacaggttgataccaggttggcattttctgatctccatacctcccgtggtttatttcttgggggttcttacatctatctacatgtttgcaagatactttttgcttcgcagcacaaaatacgagattctgcagtttttcccccttaagaacatggatgtctgtcgtatgaattatatgtctcagccctctgagggaattatatgcccgtgaagaggtcaccgagtgttacctttgcacctggctttttgtacaaaaccatcgagatcccccccgcccccccctatatcttccgaaaagccacccggaatgatgagttgtgcagtgctacatgggctgagaacaagtgtgtgtatgtgatacagaggtccgggatcagatgaaatcttgaatgtcgagcttggatcttgatttttatcagaatttcagatgaacgcggtggtgctgtgtgtttccttggttttacgagagtgattgtaacatataactcggccatgctatgattacgaagacatcctttttctctcctggtgggggtgggtctgtgtggtgttgtgtggtcaccaccaacttgttttgagtgtgtaccaaggtgagatggggcggttcaccgcgtgaaagatgcttacgacttgcgatgacttgtgacctttgaatgtgatacgggattggaatgggtgttagtaaggggaggtgagagagagagggaggcttatcgttatcatcgggacttgttggtcgtcggcagtggttgcatttatttttatcgcggcaggccggcggcggcatttggctgatcccggcatccgatggtgagtttgctggccccactgcccgctgtccttgtccttggttccctgtctgcgggaacatcgcgcaaacatcgatgggcccgggaacggagagcatcggcaaggtccactcgaggatggcttggaaaagggttcatgggttgatgatgatgatgtcagggccacgttgaaagggttagatatgggcgatgcgggggggagggacagtgagatatcggactatagtcggagagcctattactgctctgtgatatgtgccaacaagactgtgacacggggtctgatagaagatgagatgggatggcatcgataggtatcagatgaaagcgccaatgcgcacttgccgaaggaatattcttcaagacatcgatggtctgcgagtttgcgcagctgacaggttggacagggagctccgggtcatttgacgctgattggtgcattgaatcccgactgaggtgggtgtgggtgtctgtcagaccaaggaaagctcttctgcaagggtggagcgatggggcgctgagaggctgcgatttgtttatgtctgagacgattgtttatctcgattggcccagctgacggcggcgctgtatcttgccttggaggagcttgctttggaccgcaggcggcgcggctttcctttccatgatccatcgattgaatcctcattcctctgctgttcttcacgctgtcgctgtcactgctgccccacgggtgcttgctttccactaccgcagtagacgctgtctcgcagctaaccccgccgtcgccgcttctcagggtccccctaaactgcagcggcccgccaggccaatccatccgtccttgctgctttgcacaacgtcactgcatctctcctccggtcaggaactcccgacgctgccgttccaggctcacggccggcttcacttctcgccctactaggtgcgcgaatttgaatttctcttcgagtggcagagggtcaggatgagctcatcaaggtgaaaagcggtaaaaaccacaggtgggttgccctggtttttgtttgttgactttccaccaaaatcgtcaggcccagcttgggacatgcatcacccgattggatagctgccagctccgcttcgatagttcagttacgagtggatgcttgttttggcccatcttccgatcaacaaaatttatttctgaatcggctcatgtcatgatcattggggaagaccttgagagaatgctgtctcatcagagtcatagctgttgttgctgccattgctaacaaacactctttcaccccgacagaagcggaatcatgacgccgccggccaaagaagaggaagaggatccctccaacacaccgattgctacagcggcgcgccgccattccacacccgccaaaccaacaaccacggcaaagacaccaaagagcgcacccgctacctcgaacaatgcatcgacacagaagaaaaagccggagccctcgctgctcacggacttcttcctgggccgcccctcaccagcccgcctcgccgcaatgaaacagcgccggaagagtatggcagccgacgctgcgcatgtacgggaagagttgcgtcaggagatgcgggccgctgctgtccggagacttcaacaacccaatggcgtaacagacagagtgaaggcctggcagaagaagaacgcggccgctatgaaggaagcaggtggaccgccacgagccgagagcgttgcgagcgaaccgaccgaatttgctgccaacctcccccctgagagcgtgactgaagaggaccgagaacggatcaagtggcggaaaaaggccaagaaaaagaaaccaaaagacgacaagattgaggtgatcgaagacgacgacgacgacgacgatgatgatgatgatggcgatggcgaggagacagaaaaggagcaacagccatccgggaccaaggctggtccatcggcatccaaaccgatcccggccaaggacgcgcccaaaaagcggattattagtgacgaccactggatgaagcgtaggcagggcaggagtccgccacggacaggtgctccgaggaccaaagccgaagggagccccacgccaattccaaaggatttcctccaaaagacggcaaagaacccaacaattcaaagcaaaataaaggactgggcagcgagggtagagccaccagatcccggacaggctccaccgccaattcctcgagtgaagcactaccgccataaatccggggcgactatagcagtagaagaggatattgccagcatggccgcttcagagccatcattccgacccaaatccatgtcctcattcgacgacggtattcgagtcaagcctttgaacataaaaaagcaaaccaacgaaatcgacgacgggattcgtgtctatccacttcggaaaaaaagggactctgccgatgaagcgtctcaaccgaaaaagaaggagcccgacgatgacgggatacgtgtacgcccaacaaaaagcgacaatgaggagggtgtgcgggtgaagccagctgaaaccaaaagcgagtcatctgcgcgtagtaaaaagaaggaacctgcggacgacgggatccgtgtaacgccttctgagggcaaggaagatgagccaaagcgcaccaagaagaaggatctcgatgatgatgggatccgtgtgaggccggtcacagatgatgagatgaagcatcccaaaaagaaggaaccccctagcgtgggaatgcgtctgaagccggctgatagcttgaaactgaagcgcaaaaagaagaaggcacccgaagacgacggcatacgggtgcggccggtggagagcaacgatgatggcatccgcgtaaagcccgttgtcagagattcatcgcacccagacgacggcatccgtgttcagccgagcgaaccatcgtcctctgaggcacccatccgtcgaagcagaccttactctagttctgctgaaaagttaaagagagcgcaaagcaagcgaagagaggaagctcctgaggatgtcattgaggttatcgaagaggctgaaactgagctatctgtcgagccgcctctgaagaggaagaattccctccgaaactctaggcgtagaaaaagccagagtcccccagccggcaccaaggctcggtctcgaaatggacgagactcgccggaagtggtgcccattcccacctggccaacggcagaatccgatgaggagtcagacagggtgcccccgactgtccttggcaacaagtctttggctgagattccgttcgggtactcggcattcagcgtgctcgatttaccatccagtggcaatcctgataggagcattcccaagaagccaaaggctcagcgcaaccccagtttcaaggcggtgccaaaggtgttcaagaaggttgttgaaggagccaaagagatcatccaagagagcctcgagccaccacggccaccgccggcggctaacaaaccggccagcatagagtcctggctgaacaacacggttgatccttttgtccaggcttcgccaacaacagaaacagcaacggtcgccgatacacaaatcagcagcgaaccgcccataagggaatcgcgtgagacactggaaccaccggtaaagcccgaaagtcgaccagctgccgagaagcggccaaaggaagaaggaaagaaggcgaaggaaaaagaggcagcagcaccggcccctacaccatcttcgaaaaggccaaagaccccaaagtcagacagtagcaagggcaaggcaagctcgcagggcgaagacagcgatgcgacagcgaaaaagacgaaatcaccggtcaaccaggagggtctgaagaggaggcgggccaccagaggagctccagttcctgcgaaatctggagggaagaagcctctcagagaaatcctcaaagatgccttccgcggtgaatcgggcggttacaagcttccccctgcagtttatcccagctgtgaggcttccgagtacgacgatgagtactctgagtacacggaatcagaagtcagcacagagcgccctgggtcttcccacaaaaggcctatctcggactactcgtcatattactcgtctaactacgactcactcttgtcttcggacgtgtctgctcaggagccaccacgcagaagaccccctcccgtcaatggcggcgggcatgaattgtcaactatcatttccgaagaggctagtaccgtgagcgcgacggataccatgtccgagatctctcacaccaccgttacgcaacccacagcaacaccactcacagaaagaactgagctctctcgtcaccgaagtcacaggggaagccggaagggcgggagcttgaaacgccgcctcaccaaacattcggacatgatatcagtattatcactgcctgacacgggcgaaatcgtcccgcccagtcgatcaagaagcgtaaagtcctcccgcagcctccaccgcaggccaagcagggtggacaggggcaggattgacgagctcctagacgagtttgccgacgatgagtacttttaccagcgcgagctgaagaccttggtggacggtgtgattccggtgctgttgacacacgtccttcgcggtgacagcctctttggccgttccgaggctggcaggaacaaggctgatgccatggccaagtctgtggtcaacatgggtgtggtgctggagaaactcaagagctcccataagcaggtgccgctcgagaacatttatcacctcctgacgtgggtggaggatgtatcgccgctttatgacagttatgttgacgtttggcggcttgggtttcagggtcttattatcaaccttgcgcccaaattgaagggcatgaatgataatgattcgctcttgaatgcgctgcccatcaatgaggatggtgatattattggggagaatggggagagggtggatgtggcgtttttgttgaagaggcccctgattcggctcaagtggatgacaaaattccttagggtaagttgatactgctatatagctctggtcctttcaattgtgagaggtgggtgggggcgaaacttgttactgatgttgccatgtctaggctgctgtgcttgtcgttaatacgtctgacacggagcatctgctctcggtattcgagtccctccaggaaaaggctcgcaagcggcaccgagaggagaatgctcgtatcacggacgaggatgcaagaaatacggacaccactcgtgctcgagacctgcgcactctgatgcctcttgatggggtgggcattgagcagacgcgccaggtcgctgcgctggatgtgttcgcgctcgatctggaccattctaccgggcaacgactcgagtgtcaagttgagatgattcatcgagataagcccgatgttcctgccgataaaggagatgttttgatcagggagattggcaacgattctagatcgtggctactgttcccacctgtgcccatggcgtacatttctgctcgtcctagcgagacggaccaggctctggtggtcatgattcgtggaacccacaatggagtggagtggtatgaactattgaagctatccacaaacagtgaggagcaaattactttttggctggatgttctgggaagcagccccatgccgccactcactcgccggcggccaacaagtgctgtcatgggcagcacttcgcccaagccagaagatattccagttggcgaacgcaagcttgggtctgatagacctaccaccccttcgcgttaccgcccacgaaaggtggtggagtctcctcccacctctcctgctcatgatgatgcagatgtgtcgcctgggcggacacctaccagagccacatttgcgcagcatcacccgccggaggagagagatgaagctcgctgggagggcccgtcgtcctacgacaccccaaaagcctcgaggccggcacccaacacgaccccctttcgcgaggatggcgcccctcctccgcctatccaccggactcttagcgaaaagtccaacaagcttgctcccccggttgatctcaaggtcactggggtcaagcgccgagggtcgtcgccgctcaagcacgagtaccacccgtccgatgtgtcgtctgacagctcgaccgaggtgagcgaggattcagagtcttcgtcgtcttccagcgatgagcttgatgaggatgaggtgccggacacgatccctgggtacagcatcaagaccgcgccgcaggtcgcttccgtcgagacggtggtgtcggatgataatagtatcacgcctgatcattccgcttcgcaggtcggggtttcgagccaggcggctgagaagcaagagggggaggaggggcagaaatttgtggcttctgtctcgtattggtcttccaagaaggggatgtggaaggatattgtcagcggtggcatgacgtctattgttgtgcgtcctggtgttatggaggttcaccggctgagcaaggagcaatccaaggcttatcctctgcagtcgtcgggtacttcagaggtggacatttcccaccaggacgctgggagcagcgccccgcttatcgcgctgattcttacgccggtggttatgatccgccgcagcacggcgctggatctggaagtcaggagtgtggcttcgcccgagtcgaggctcaagactgacagcacgatgtatcggttccgcgctgggacgcagacggaagcgcacagtttgtatgaggcggttcacttgagcaggttgaataatgctaggtacattcagcttgccgaagaggcaagagtcagatcgttcggcacggcgacgggggttcccggggaggggagtgcggatggggacgggagcagcaggagacggagctggttcgggaggaagaattcttaccgggcgagcacgcgggcgccgagcgtgtcgcagcatagcatgtcgagcaccatctcggcggggagctttttgaggaggctgctgggaggggggaacaatacctttaatattgaggagtcgacgttggataagccgcctaggatgagcacgggcactgttgggtactcgtctggtgcttcttccggggagggggcgagcacgccgcccaggagcgtcaacatgtcgttgtcggggtctgcctcccgggcgtggtcgacggggttggcgaaacctttcagtcctgatcagccgttggagattcgctgtcatcttaatgtgcagaataatcggtggttggacaagggggattgcatcctgcacatctcgcgcccgcctccgggagtcaggcaggagctttcgctttatcacgggttggagaagaggatcattgttacgcatgcgagcaagaaggtgggggataagccgttgatactgctggatgcggtgctggggagcaagtgcttcagtcttttggggagcaagggggtgatgtgctctgtgtgggaggacttgagggatgaggaggggaatgtgggtgttgcgccgaggatggggggtttgagcggacgggtgacgaagtggtgttttcagtgtaggaatagtcagcaggcggattggatcatgtggctcgtcacggctgaggtggaggggttggttgtttagggggtggcgggcccttttgcctctgggggtggtaaagggagtgcgaacaaggaaagggggagtgtggatggggcgagcttggggaggagtagtagcagtggtgggggcggtgggagcataacgcttgtggggagtggaggggggagtagtggtattacccttgttgggagtgggggtgggaatagtttggggaggagggttagtttgagccggagtaggagtgggagtgggagtaacaaggggagggaggtgttgctgatggggatggagaggttgaggggggttaatagatggagtgtgaattggtgaaagttaattacatattatggggtgggggagggtttacttgtttataatcatgttaatcgaaagggggggaggaggcatgcgcgcatggtgggtgtgtttggagggagtttattacggatttttgggatacccatacacaggcagtcatgaaagcattaggaagaggggggggcggtcggggtttctctgtttagtttgatgggcattgcatgcgtggcttacatgaacatacccgaagtttttaaaaagttttggttgtattttgagggttaagtttgctagatgtgagatggttgtgattgtgattgggcaaagtatggaaggtagttgaggtagtcatgaagttgagacgatgatcgaagtgttcaaagtgtctgaggtaccttttatcgtctctcatattcaggacgaaaaagggacaaggcaccgaacagttgaagacaaataataccaagatctcacttgctcaacgagaactgattaacctggtcaaaattaccatcacacaccacaccatggctattaattacattacatgacagggcatctctgtctgctttttctgcatctcagtccccccccttcaccaccaaatactagccttgcacatcctcccatccgtctgctcattcaccttccacctctcactccccaccgcgttcctcgcgtaaaagaacccctcggggtcatacctcagcttgatggccatcaacctcgcgtaattggtcccaaagaactccctctggaacctcggctgctggaagtcggcctcgttcatgtacgcgcccgagttgggggtgatgctctcaatcgcgggcatgatatcctcggtcatgagcttctggttggcaatcatgtcgttccacttggcagggtcaaagctccaatcggtagtcagagtggcgtggacgagcgtctttctccaggcggggaggacggcgttggccgagttgcggccaaaggaggagacgtcggtgccgacgccgatgaaggtgacgcccttctcggcgatgtagcgcgaggtctgggagagcttggcgggggtcttggtgaaggtgtcgcgggggatgaggcggccgccgtactgggcgatgccgatctggatggcgccgatggggagggggccaaagtattggtcgtagtggtcgtagtagttgaccgactgggagtaggccgcgttgaagttgacgccgagggaggtgaggttggcgaggaagggggccatgatggtctcgacttgggcggcggtcttgttgtaggcggtgacgggggcgatcatgaagaagttggaggtgaagtagtagaccaccatggtgccggcgtcgaccatggcggggagggcggcgtggaaggcgtcgatgcccttgtagaaggtctcggtggggttgttggcggcgaagaaggagacggtggcaccgccgacgtagctgtcggggaaggtcttgagggtgacgctgacgacgacgccgtagttgccagggccaccaccggagagagcccagtagaggtccgagtttctggtacgggacgcggtgaggagctggccagaggcggtgacgacctcccactcgagggtgttatcggcggagagaccgaaagatgtgctcagggcggagtgaccaccaccctgtgtatagccaccagcagggccaacagtaggacattcaccaccgacaacgatctggttgaccttgaggccttcgttgaggaggtcaaagccttggacaccggctccgatcttgacggcagtacccttgtagtacttgtcattgtagttcttccactcaatgctcttcatcttgtgggtccagacagacagagcaccggcaccggtagaccgggcaaggtagtcatgaccagtgttgcggacgacgaagcggatgttctttctcctggcaaagttgatggtagcaatgatgtcctgagcagtctcagcagcgactgcatatctgacatagttgcccagtgtgcacggcttgccctgagcagtgaaggggtcacagctctggttggcaaagaaaggggccatgatggaagccgagtcattcatgctgccaggggtgtcagcagcgtcagcagcacggtggttgttggacgatcgacttactgaatgtcgggcatctgccagccatcacgcaattgttggcatctgacggggtcgtagttgggatcatggcaggcctgggcgagtgggaccgtggcgatcagctttccaccgacggtctggttgaagttgttccactcgttggtagagggccagcacgagtcgcctgggaagcacttgcaccgagggccgaagaggaaggattccagagaaaaggtggccgagttggggtccaggccgaggatgctgtcgtcctgggccaaggtgccggcagccaagaggccagcggcaaggaagatggacttcatgttgttgtttttggtggaggaagcgaatggacagaggtggcagtcaatcgggaattaaagaaagacagaagtgactgaagtggggggaggcgaagatctcctgagggagaaaacatgttgcaggaggacagcaagccagccatcaagacttttaaagagatcttccatctacaatggagcgtcgtaaatcacggccgggctatcgggacagtccgcgaaaggggttagtaattcgtagactggagaatagttcatctgttggtctgaattcgtggggaaaaggcctgaggtgtgtcggggtaccatggagaacgcatggaccaaatctcggccagctgcttctctgacggggggccatggctggggtcagtggttggttccgacttggcttgatctctgctagtttgcgcttgatgtttatactatcaggcttggtgatggtcaagacgtcaaactatcttgcagctgagaatgtctggagtgtagattagagacgagtgcgatactgaggcgaggtgcatgcttgaaagggagggtgttcggttacacgttcgatgccacatggcaaatgggtgagatgaaccatgaaccaacaagctcaggcacgaccagatcttggggacgctgcggtgctttcatcaaccgaggcctcggcacattccgctgtagctgtaatccgtaatcatataacgagcccgctgcccacttcttttgtgatgaatcgcatttcgttatggtcagcaaaaaatgttgggctgcggcttcctcggaacccgttaagtcttattgtgaccctgccgtcaaggacagggctattgttttacaacgtggaatcaaaaaatagacacagtttcttctaagacgccggcgtcgacccccacacagaagcgatagactttttctttttctgcgcgctgaagaggctggccaagggtcgtcattatgcgagggatgaggatgaataggattggtgtgcctacccagggttgatagtgggaaagaccggcccccactgaatgaccctggttttctacgtagcttgtttccgcctggatcgtggagcgcccggggacactgggggccgttcctagcctcgctagcctcagccgcaagggttcttttgttctttgccaaacggcgcgatccaacgtcgtccatatcacgtcacacacgatattgcaacctgcggtgccagaacactcgagaaaaagcaaccgtcaaccagagagagacactgttcaacattcgaggagaatgcctctctcctatcagcaattctctcgctgccttcaatagttcacaatatgcagccaaatcacccagcagtcacccagtcacccagtcacccagtttagtgagagacagggaagggcccaccatcttgcagtttgccgggggcaaactcaactctaaccatgcatcatcccccgagcgagcgccgcacctggaaacaaaccccgcagttgcccgcccttctcgtccgccaacaccaacggcgtcgtgagcgtccaatccactctgatcgtggcagctcatcgccatcatccaaagtggaggcccgaggcgacgatcccgccttccggaagggggcacttcccctcggccaccttcccggatgagtgatttttgattaatggccctaatttgggggcgtcgagcccgagcctgctagttgctgctgagaggaaggaagagttaaagggcagaggagacagaaggaaggggcagaaggacactcccaccgccggcacttcaaaaagattcgctaccataccatggaaaccctgactcgaacacaaaagaagacgaggcgatcggatggatgatcccgtggcattcttctcaacctccatgggccgatcctgtgatagaaactcggtgtactccactgaccacaacaacagtgtgccaatcgcatcaactgtggcagccaagcagccatgctcactgtttctcgaaaaaaacacccccccgtgatcccctacacgcacatcccgcgcagtggtatctgaggtggctctccttgatcttcgcggccttgaagagcccagcgtgtggcacaccctcggccaacgcaccgattggtgaatagacaaacacccccagagcaagagacccgaaacccctgccaagtgaccgacttctctttcccagagagcatgatgcaacgctttctgcatggtttctgaattcgattcgggcctgccgttacaacagtggcagaattccctgcccgcttggtgcgttgccttgacctctctcctaaacctgctacctagcatagattgtataagtccaagggggcgtcaatattcgtctctgatacagagaaacatgcacataccacctcgaggatagcacggcttgtacggtgtatatccctcctcctgcctcccccgagacgtcgtgggtttcgagggccttgtctgaactttcgtctcgtctcgtctcgtctcgtctcgtctctggttctcgacgctctccgtccgacgtgcagatcaaccaccatctctggtttcgaaccctcccgaaatcgtcagtcaacatgggctggacattcaacaccagggacccggatgcccctaccattgggccgttgatcactggagtttcagctgctctcacctttgtctctctcgtgacggtatgtctccgggtctatgtgcgggctgccatgatcaaagccttcggtgtcggtaagactcccacgcgagatttgggtgtgtcgatatcgcctctaacctagttgtccactcacagatgactacctaattctcatcacttgggtgtgtgcggctggctttgccgtcgtcaccattgttcgtgagtaacctcgaagaagaaacaccaagcagcgaagaagaaaagaaaagcactaacatctcggctgtccagaaacaaaatggggtcttggtctacggaacattgatgacttgccccccgaaaatatttataactttgggcttgtcagtgtgccaccatcaacctagcaaagaaaatcatcatgaggctaaccgccatcaccaacagattcaatacatgggcgcaccattctacatcagcagtatcttgggcttcaaactagccctgctgttctcctaccttcgcttcatccccaagggtatttaccgatacatgaccattggcgtcatcgtcgcctgctgtctcttccacctttcttttctcatcgttcagatcaacctctgccagccaatcgctttacaatgggacccaaccatcacagaaggatcctgcatcaagggagtgcccttctacaccagcatggcctccctcaccatcgtctttgacgttattgtgtaaggccctcttccctccaacccagcctagacccgtcactgactgattttcccctgtagtatgctcacccccttccccgtcctcgtcaaatcccgcatccaaaaccgcaaaaagctcgtcctcctcggcctctttggtctcggcctcttcatcaccgtcatccaaatcatccgcatccaaaccgtcaagcaactggccaactacctcgactcggccccgttgatcctctggtccgccgtggaaaacaatctcggtatcatcgtcgccaacgtgcccaccctcgccccgctggtcaagtactacaatgagaaatccaccggtggaggaagtggtctccgctccaagaagactggttacgcctcccaggacgtcggctcgagatatgcgatgaggacgtggaagagcaacaggtccaaggcgttggaattgggcagtgtgcatgatgctacggacgggagttttgaggggcatgtgatgaaggggaataccagcaccgagatgattttggatcatgaggggattacgaagaaggtggaggttgttattactcgcaactaggggactgacaatttgtggggggtggggggggggggtgttgctggatatactgacgagtgggggagggaaaatgcaatgacgaggatatgtgtgcatgacttggactggattgttaaagaaaattttggttatggctgtttggtgtgttttcgcttcaggatagagagggcaccggtccctgtaatacatacatagagtggtgtacaacaacttttccaatggtcatcatgacggttctagtggtggtctaatgagagacgtggtgatggccttgacactaaatgccgcacaggtggtgggcacatggcactgttgtcttatagcacaggacatctatattgacgagatgataacaggtaatccaacaccaaggcatgacgagtcgcaaagtaaacaacatattattcatcaagaagaatcacagcaatcgtcggtcaaacatgacatttattagaccagatatctacgagtctcgcgggtcccctgacctatcgtagattcgtcgcctcattaaaaccttcctgggcttttttcttcacgggtcaaggaaaaagagcggccaccacgatcgtccagtcggtcatctctccacccagtccacctcgggtagccctccatagtatatacactccaaaacaaaaaccaaattacatgataaccagcgtttccaaaccgagactgtataggtatcattgttgtatgtttgatgtcgtttctgtgtcgtttccacatcatttccatgtcgtttccaagactccaaaacttcgagggggtaatcatgcaagtaaatccaacgctgtcctcattccaaagaacaaaagcccaaaaacaaaaaagatcctcccctcagactgggggtggtcaatgagatgagccaagatagcctcatttttgcgtgagatcagccaaaacgaccctccgtcttatcttacgtctatgggatgaagggtgtatttttgagccttttttggctgttgaaaagtggtgacgtttggttttttttttttttttttggcggtgaggatgttgtgtgggtgtccggtgacggttgtggcctgggtgagggtgacctgggtgatggtgaaggttgtggctctgtggctactaaccttgccaagatatcgggccgaaaaaactaccagaggtctcatgagccggtgagatgagatacatcgtgtgggccgtgggatgagccgaaggtctgagtccgtgggatgagccaagatgagggtcatctcgtctcatctcatctcactgactaccctgttcatatccgtccatggaaagccagtccgcgtttggatcagatgccctccaggaccccaagaccgtaaggatcagatgtccccatccgctcctcaaaatgacttgccactggcgcctggagatcctccagccccaaactcaagtccacagactcctcacccgcctgcgcaagctgctccccctcaactcctccaaaattcccgtttgagagctctgggtcaaccgctcccaaaccccggggccacaacgtcgtcctccacttgagcgagctgttgcccgccaggttgttgcccgcttgctaaccacctcttcaacccgcgctctcctcgcgttttgctcggcaatggcggccttcctcttctcttgcccaatcgttttcttcgccgccgtcagatatctcctcctcccccaatctgtgagcttgtcccaagccagaggcttatccccttcggcttgagctttcgcgtgcagctccattgccatgacgcgtttctctatacacacatgtgatcagcacacaaccggggatagcaaggggggctacgtactgtgctcctggtgggggggtagaggttaaaggcgaggggcgggctaggggagagagtgggatctagacatcatattagtatgaataaatgagctcggatgaaaaaaaaacatgggcgtttgtaaacgagtaaccacgttcgccaacgctggcctgttgggagaggagacgaggggacaaatcgttgaagacattcgcaagccctcagtatgttttgaaaaagagtataagcagacgtgatgataaagtcgatgaaggtatttgcaaatttcaagaacggaatcccaaaactattcgtaagcccccgccttgaccgttgaaataaaggcacaagcaaatgtaaggacaaggtccccagagccattgcagatgctttaaaatcaaaactataaggcgagcagatgtaggaagaaaacagtgaaggcatctgaaaacgcttgaacaaacagaaaaagaaataaagaaaagtaagaagaggaattaataatagggaaagataacttacatgcttgctggacaccgccagcaggaagattacccagcgcgaggcggggaggggttgctgataggtcacgaaactttgcatcgtcctctttggcttctatttcttgggcgttcagtgtgctggtgctggtctggtgctggtgctgttgctgttgctgttgctgttgctgttgctgttgctgttgctgttgctgttgctgttgcaattcctatctcttgaggattcaacttgctggcgcaatgagaacacctgcctgccctaggactacccccagaaccacccggagagagctgaacccacctaccctttttaccacttagaagcgtaatggacttcctcacctgtccaccgtcctggtaattgcgaacaagcaccgccagctcatttgaagcttattccccatttcccacctgacactcagtcactattagcgcgttaattcgatatcctgcaaaacccccgaatccgattgtccatctcgctcagaaaatcaaagaaccaacaaccaaaagccagcatttccaacccgacgactgcaaccacgccatcactcacctgtcaaccctctgctatccacacggacatcgaaatcgagactttcatcatctctatcgccatctccgtccccaaaaaatatcacacaccgaagcaataaccgtcgattacgatcccgaccgcaaacctcacccccagcattccaaacccaacgatgatctcaacactactcgccagaagcaccccttgatagacatcgccaacgaagagatatcagtatcattgtcacctctaccatcatcacctctaccaccctctttccccttcccgaccgaccctgctgcctaggtagatatctcccttacaaccaacgccacccccacagccacatccctggccctcagcatctacatacaacgcgaactccaccacagcatctacctctactcgccgcccgagtaggagggggaggaaggaatatccaaaaaaggagaggcctgattcccccgccaacgtcaatccgcgcagtcgctggtccccctttcccgtgcgcgcacgctcgcttggctggcctatacgttcacaagatcccaagcatcgcgaagggggtgttatggtgatgaaggggggtttttttctttctattttttggggaaaatatgcgaaaatgacactgtttttgggagttgccttgtggaatatgggttttatgcgggaaaagcaggggttgcagcacccctttttcgtgcatatgcagaggatcgtgaagcaaacaaatcaggggttgcttttgcttgggaacttgagaagatcgagatatatcatttctggtcataaaaacacagggaaatgctcttttgacgggaaatcgtcggaaacattgaaattgacggatttatcgtcggtttttcgttgcaaaaatgccattttcgtagaattttcatgattttatatgctgtcaaatcatcaatatcaagcgctggtctctcagcctctccaaaacgcgctcccagtactaaaacacgctctcagcacttaaatgcgctctcaatagcaaaacgcgcttccaatccgtcagacgttgtcagtgcccctgaaacttgattcaccgccctccccacccgtcatcacctgtcaaaagctcagctgtcccaaaaccgctgtcatttgtacacagtatgtaatatctcgccccgttacgtaggtacactccccacggcagtcgtcctcagccctgcatgggcgccacgaccttccccccatcgacaataatcagctcgtcaatcttcttgcccacatcctccccccattctgacctcttccacgtcgtgatcctcgcctcgttggtgttgaaatcgaatatcctgatctttcggtgaaacccaccgtaaccggcgtacccgccaaagccagtcgcgccagcgtagcacatccacagtgcgggcttgggctgctggccctcggcgttgatggatttcaggccgcagtactcgttcacgtggtcactgccaaagcgggttagcaccaactaaccttgttacagtggtaggttcaaggctggaacagggcggaacggctgttcggacggggtgggccgtggagctgagcgcttggcgaagcctcacgagcacaggctccggacccagtgacccagaacgccttgggcatgcaagcctcaggctggactggagagaggctgggccatgcgtcaacagagcccgccaactgcccatgaatggcttagactggatatggaggacatgccatcactcaacgacagagccaccaactatccattagagacttcagactggtcatggaagcgccacatcagttgatacgacagagcccaccagctggccacgaaagaccgacccaaactgacaggaaagacacctcgccagttgaggacagggcccaccagctgaccacccaagacccaaatcggccatgaaagataaccgcaccactcggcatggttcatctcacacctcgccctgcccaagcccaacccatccctcttccagcaagccaacacatcaaatgaacaaggtatcacttactgcccacaactaaccatcatcaccccctcctcaaccaacgccccgtagaaccccgaattatacgccggcgccgtactcgcctccctcatccactcacccacaatcgtcagattcatatccctatactccggaatcggaatatgaataaacgcaacatccatatgatgcttcctgtactccttatgcgccttcttcaaccccttcgccgtctgccgaaaccaatcgatctggttctgcttcaaccagtcatacccatggtacttcctctcgttcggactatacgcgtgcgtgtcaagcagatagaccgtgatggctgaatgccccgagctcccctgggcgagcacttcgatgtaatagttccccacaccgtcgacatccactggtccggccttggagagggaatacggcaacgcctcgatcagctccatctgcgcagccctcgacatcgacccctcgtcgtcgtggttgccaaagatggaaacatacgggatcttgtgcttgatcaacagctgggcgtacttgaagatggccgactgcgtgtcgggcgacgtctccccgttaacctgatcccctgacagcaccaccagatcagggctttcttcttcgataaccctctcgataaaatcaatcgtcctcgtgtccgcctcgcacttgcccccatgcttctcatcccacccaccaggcaggctatccctgcacttccccacccccgtcgaaaagtgaatatcagccaactgcatgattttataccgtccattatccctcacccgcggcacaggcttggtgatctcgaccggcgcccccctccgaacagtgatgtgcgcagcatggaacttcctccctccgtcgagaagcaaagccgtcgaaccagtcagcatccacccggccctcgcctcgatggcatcgtccccgaaaagaacatcaaccgccgtgacggccgatttcgagtctgataccccccgtttggaggagcgcttgatccagaggccgccagggcgggactcccacttctcttccgagtctaagttctcggacgacttggaagggttgagtctcccgactgttacgtcgatgacaaccttgtcttctgaggtcaactcctcttctcgcttacgctggacgtggaggtaggcgctgctgagcaccgactgtttgagatacaaatccttctctaccctgtgccattttttgggatcaagcttgcagcttgagaaggggtttagagaggagcaagtggtgagggtgatgtccgtgatgacggagccgtggtggtgcgcggggagataggtgtggattgcgtttggcaagacgcggtagtgccggtcaaggaagaagatgacgatgaaggtgaagatggcggcggtggaagtttggactattgtccggacctgggagagggggttagcggcgggtcggcaagccggtggtaggacgtgtatgcagggtaaatgagatcacagccaagctaggcagagaacaagagagaagagcacatacaattcgtcgtgtcattgtagctgttggatttctgtactgaaaaaaaagcaaaaaaaaaagccaaaagctaaagtgttggaaaggtctccaactgtatcgataggtctggcctatggacttgtagacagagcttccccccccccgtcgggtattatgtgttatatactggatgtatcgctttcgtccgtcagatcgatctaagatatttctacctcgacgcaaacacgaacttgcaggaaaaaagatctgggaccggccgcgcagcagcagcagcgtcgtggagggtagacagcagcagcagcagtggtcgagggtctatgcccatctttctaccatgccggtcgcgccacacacaaagaagaaccctcaagcttcctctcttcttttctctcttgctctctctctctctctctctctctctctatctctctctctgtatttaccgatcttgatcgtcgtcgccgtcgccgtcgctcgaggttcggtctctgtgggtatgccgaatgtcgaattcgttggacgcagcaaggagggtgatggactcgcttattaacccgttggagatgctctcgagcgcgtgtgatgcgaagcgtaagggtgagccacgaaagctaatgtcgtcggcgttgcaatgatagcaatggagctctaggtacctcgatgggtaggtcgttgaacgtggtgctggcaacagaaaaaagttgagaaaggggatgatttgaagttgtccaagacaggcaggcaaggggcttgaggcggcggagtgccgacaatccggggtaaggtgagcagccgccccgccaagatcctggtgttaggtggggtggggacggttaaggggtgaaacgttctggaatctttcttggagggacatttgaagacggtaagtacacatcattggtgtaaatacgctggcaaatagatagacaatacatgaacggaacgataattctctcggtaaagatattttgggttctcgacacaaccgtgacatcaactctgccctacccaaactcctggatcacaaccacgaccacgagaatgtaaccaacgctgtggtagtggtgacgttcggtgtggttgaatgaaggcgtaacttaaatatggccgtctgagtgggctccagaacacgagcagatggcgtaaacgcctagtctctcaacaactgatgattccgatggtgtgatcaccaccggcctggccagcaggaaagataaatatctctcccgacgcacatgcaactccatattcacaataaaattcaacacacaagtcgttcatttttaacttctttccaaattctttcctatcaatatgtacagccagctatccaatatctccctcttcctctcccatcttatatctcctgcacagcaagtaaagaccgaccgggggtatctcatcctcatctccatcctctctccccaacaaacaaacaaatcgctcaaacgatgcccaaactaatgataccccaaaaaaaattcataactccataacgttcattgtcttcatctcctcttcctccaatgtaatccatccatccagtgggtgttccatatcatagtgcgtgtactcttcccctcgtcgaacgtattatctccagggaaaaaaaaatgttgcctattaataaccatgtatgtccctcctcgctcctgtcgattgtgaagacattttgtcgaagcgaaaaagatgatgatgtcgccgtgctgtgtttaccggccgtgagtgatgagaggcgaaaataaatgtccaagttgtacagaatggtaagtaaaagatgggcttgcgccctcttgagtctttctctttgttgtctttcttataggtcttcggaaatgttgacagaaatatatgttgttgttgttgttgttgttgttgttgttgttgttgttgttgttgttgttgttgttgttgtgcgttgcttggtggtggtgtcgtaaaccttctttgtgggagattaaatactcgccaccctcgccctattcccatccggcactcgtccataacacaccatcaacttcaaactcgtcccccactcctcgcactccttcaccaacatcctatccctccacatgcttcccttcgacccaggccaccccatccccggattggcaactcccgcgctctcatagcacctagtataccaccacctccccaccttggccaccatgctcgtgatactctcatcagcgaccggtccctcctcgctcatcagctctggcaggctacgttcatccttcttgttggtgttggtctgggtaaaggagactcttgaagatcgggtagctgggcttgcgacggggatgccgactcggcaggtcttgatgtcggtgaagcccttcctgttgatgagacgcagcatcaagtccgaggtggaaccaagactggtgtcaggggtgcgggcgtggatcctttctttcaaacgacgaacagccctccgaccacggttgcccatgttgttaaagtcaacgtcgagaatggacagctcgatgaatccgcctggcttgagaacgcggcgggcttctgagatgatgttgcggtagtgggactcaggaccggcggcagggaagcgaaatacaactgctgtgaaggattgggcaccaaagggaaacttgtcgagatgcgagcggtactgaatttggtggtggttgggtgggcttaaagggatggtggtgctggaggaggttgagctgcggttttgatgctcggcaggcaaaggagcccgaggagaaaggttgaagaaagttgcggcgggatacgtctcggcagcataaaaagaccagtcgtcgttgccgaggccgtcaatcaccaagatggaaggacgtttcagggagccaacttcaggaatgagctcgtcgcggatgggactgaaaagcacatggccaaaagtgagccacttggagactgtcatggagcccacacggaggttgacttgagaggttggtgtgatctcctcagagctttggctactgcagctgccggacgagatgcgggtctgttgaacttgtgctggtgtgctgttgacttgcggtgccggctccggtttctgaggttcggcagccgtggtgggcatgtcagcagtgggaatagagacgcagatagacatgccagtatccaaggcacgtcgaacttcctcagccatttccgttgtgtatacactggagctagtttgctccatgccctgacgcaaagcctgcaccaaactaggcaaaggcggagggctgagagtaggcgactctaaagccggctcgatccgtttggtagcctctagacgaagtggtttcggccaggccttgcctccaatggcagagaacctgggagtatcctccccaagcagatcgttatactcgtcccaaatctcatcctctgcaagaggagcgctggggtctgggacaactgcagtggcttccgcatagttgaagaagccacccgagctgctcgaagatgttgtcgtgcactgggagttcttccgtggcgaaaagcagaggaactcgtgatgagagcgactggggtcgacaggagacaacctcgggataccatagatcaacgctgaaatgttgctgatgctccgttccgtcagctcgtcctgaacgagctcaggcgtcaggtccttgggagacatgggcgcagtggccattggttcaacattctggacaatggacttcactgctggtgcttggatgcttcgtctgttgaagggtctcgagaaactgggaggcgagagttgttctgtcctggcgctgacaacctttggaatccgaccaacttgcgggagtctgctcggtcgaggaggagcctgtcgtggaggcatggcctgcctctcaggtggcgacattggtactgcagacatcggcgcagggttgataggagagatgacggtacgttttgggatgatagacgatggagtcatattcgcctggggcactggaatttgcgtcgagcgtctcttatcttccgtaaccttcactggcggttgagctggcggtgtatctgcccgtttggcttctcgaagcacttcatcgaggtctggggtttctgcatcctctgcctctgacgagtcgatcaaggtgtagaaggccacaggcttgcttggaggtgcttcgacggcggccacagtgggcttctctggttctacctgtttctccacggcaggttggctatgggatcgaccaaagaagttccacttgcggggagatcgagaacgttttatgagcttcttggggccgaggttggtcgaggtggccggttccggtttggccttggccaggcctaccgaggggtcaaagacagagtcatccgacataatgctggcgtccaagctggtgagagagggtgacacaacttgcggcctggtgacgatcggcttgggcagtctcggaggctcttgttctccagatttgagccgctgtatagatctccggagggcgagggtaggcttcaacgtttgtgcctcggaaacactgctttcagatgggcgacgagacgaaggcgcaggggatggtgtaactccgcgtggaataggtgacggccacagggtattgcgtggttgttcgcgagagaacagcgagatttgggagctattcctggactcaacactggggcgtcgaagagacatgctctggctgctctcggtgcgtgtcagttcggcactcgcgtttctgttttcgataatctcgcccccggcaatgatgacgggtgccatccgctccgcaagaaacgaatcgcctggcttgccctcctgcgaggacatggtaccaggtattacacgaccagggagggtggtgctgcttctccgacgtgcatgtcctaaccgcccatagccctcgtgtccagtgccagccgcaggtcctttcctcgccgtcttatcctttttctcttgctcctggcttggctccggtactgttttggttcgccggccaaagagcgtgaagcggctcttgaagactgatacaccaggactgggtgtccgggtggtcctcccaacttctggtttggaagaggccggcacatctccaaaggtcgcagcccgaggtgctggagtagcttctcgaacagggggccgccgagagagatagctcggtcgatccggaagagatgacgaagggggaggtcgacttgcagggccttgggtcgccagggcactatgtcttcggtcagacaacgaggtagatgataagttgctatgaacgaccgggataggttggcccaatggcactcgaagatcgggggttccatctcgactgggtctgacaggtggcgtcgccttgggcgaagtgacaggctgcgcagcctggacatggcgagggcgggaatttgatgtggctttggcgggaggaggagaggccgtccgtggttggccagcctcgcgtgcgggttgaaatggcgactggccttcatctcggctaccgttggacttgtgcgacgactttcgaggtgggggggtcggtggaagcacaatcttcttctttttcttctctttcccatctgcccctgcgcgaactgtcgaattggacgaagacgaattggacagctctcttaccaccggcaacccctgaggatcaacgcttgcacaatctacctcatttgatatgcttccgttcctgcgtttggtgactggaggtcgtgtctgaacaagctcggcctgtcgtagtctgccggtagatggtggtgcaatccggaacggagccacgaggccaggagattgagagcacatcgacgttggtgtggtgtcacggctgtaagggccaggccccggggattcggaccacctggttgaggggcttccgctaacttgactgctatttcccgagaacaaaggcgtgggggggggaaggtcatgagtagcaagtcggtggagcacaacatctccgtatctgtccagttccgggtatattgtcactggctgggctgtggttttggcaatctcaacctggtgagcaacatgtatctccatcgggctctgggtgagctcgcgatcaagctgtaagctcgacaagtcgggtgaagccagcgagaatgggtccgagtctgaggagttggtcctggtcgactcctcgtggagatcggaacggttggccgtgtcttggaccaggcctgagcgttttctccggagaacatttcgtggtttggagctgggggccggaagcctgctgctggttatcgtcgtagtcacagttgaacctgttaaccccaaagtgttggggctgccgatcgaagcccggaaatgtgactgttgaccgagacgagaaggctcgagctgaccatcggacggtcgtcgatgtgagagagccattggcagtcggctggacatcttgggttgcgggatggcccgcaacgcttcacggcgggcatctggaccttgtttggtcttcgaactcgtgccggaccctatcgtagcccttggggtttccatctgagctcctgtgtttctgaccccaatatcacctgaccggccaagagcctttggccctggccttcttgaagccatttggattctatgttttggaatcaaagtaggtcgtgtagaccataatcacctgtggctcattgaatacggcgtgaggtggcgcaaagggaagctgtctcgggtggtccctaatacgatggaggcgaaagtggcggccgcgtatcgaggggagcttttgggggcaaatctgcaaccgggcaattatgtataacctcaagcaaccgacactcgggtcaagtctcctgttgaccagaacgccttcgatatcaggccgcctggtggtgaggccttggtgacacaaggcgcaaagagcctcgtggtgtgtgttgatatcaagaattcgccccgaagcaaaaaggggccaagagtaaagagatgactaaaaattaaagatggcaaaagaccgaagtcagaatagaaagaaacgtaaaaagggtgggagtcgtcgccgggacaggggatatcgatgtaggtatatcaacagtcgaatgggtagaggggtcgctagggtaggtaggtagtgtcccgcgaggtgtaggtgggtgggtgtaagctcgcggacgcgggtaagaggtggggtcgtgagagcggaagcgcttgcgctgtcttgggtctaccttaactcgacctgtcctggtaaggccgttcaacggctggtcttacacgggttgccgaggagaggagccggtgaaataagatgagaagctcgggaagtcgtaattagaagagaatagaagagaggcccacggcacagttgatctttgaaagagagacggtgagagttttccccagacagcacagaggtgtatgtctagctatgccattgaaaatccagggcttcctggaccctgttggacaggatggatggagagccaggccgatgtacacttgtatcccgagctatctttgacctgagtggcgtagacgccgtcgtccagacctgcatgcgaccccttggaggatgtcggcaaagtcatgtgggttcgttctaaatggacatggccgacaaatggcaggattgggcagaaagaagatgcaagagggtccgttgagagagctcagttgccagtcctgctgctgactcacgagggattgtggtattgactgcaggcccgttgagaagaaatgggtcgaggcagcccagctctgacgaagcaatgcattacatagagagggagagaggtacttcgtaggatggcaaagtgccctggggttgtgttgccagtggagtcgccgggccggggcagggcagggcgagaaaggctccactaaagacggccctcgttcacctgaagactgcatgtcgctgggcagactgcgccgcgatgcgcgcgagacagccctggaagctgcatgaccctaatgccctatgagcgtctgaaaggcagatttttccctaccattgggcaccggaatcccaaataccccagtcccattctcccaatcctctcaattctcctctcaaagccgcatatctcctctctgcagaccgacgtggtttttgcccatctcatgaccgttcctgaacagaagcgagggagaaaatcctgcaagtaatatagcagtcgtggacgctcttaatgctcttaagacctgggatcaggcccgaactctcccaagactcgcaaaggcggctggagacgggaaaccgttcgccgccaccggtctcgagcggcgtcgagcgggacaagcgggagttgagcggcgtgagtggttgctatggtgggcttgcggggtgtggtccacggttcaacgtttagcggtctatgatctcgggtaattgtggtcgctagggtgaagttcaacagacggagagtgaggtcccaaacttgcgagtcgttgatgggccagcaagggtcgcaaactggtcgctgcgtttcgaacccgccagccgtcccaagacatcaaaccggggctacgtctgttcgtccgaaagtgcctgtctgtcagtgtcagtctagcaaatcggtgctcttgatggccatcaaactcccaactctcgcggatcaccattcgagacatcacaccagcaggctgtcaaaactcccaaaatcaattgtgtgctctcacctggtgtaagacaatcgagaccccgcaccacccatgtcgtcgatcaccagggccctagacagctctccacccacgaggaagacgccactctttcctccgacttcacgtgctcagacaaacaacctcgcgtctcctgtagtcaaccgccattgcaacacagacgaacacgatgggggagcacagcatctgccaaaatggagtgttccagaagacacaaaatcaacggatacgaagaagaggaagacgtaaaccacccaaccgagacgccgtggtttggccagccgccgtgcacgtgcgtccctattcgtcgccaaaactgtggttgccccgctatttattctgattggccagaataccatcttttccaaccaatcgtaattctactctcttgactttcccgtctggactttttcaacgtccagccaaacatcatcactcattaatcaaaaagaaaaaactctttcctgactcctgttcgaagtggagtttcacttatttactcctggagtcatggagatatcattcggccgttctcacggactttgaaaatgacctgtccactttctcatgtctcaactcggacatacaagccctctccgggatagcacgcggtgatgcacaagatctctctcattttcacatcctttaggagcggggttattactcacaactagtcgggatatctgtgataactgtgatgagttgaattaacactgtcggcagtcgcattcgctttgaaaacggcacagcctccgggatctgttctgatcccggagccgcactctctcctccgtgatcgttgctcaccgactcacgacaccgctctgttgaccacagaagctgatatctctacatgtggaagtgtgtcaattgtcaatgaacacatagaatgcctcgtggcttgtaagctgctctcgatcgatgcaaggtcccgctgtctgtctaccacgtaaaacaagtgacagtgggatggttcctgcaccacaaatgcacgatatcaccaggaatcgaggatgagatacgtacggcagcctgccaagcacgaactaaacagtattgcccaaactacaattggtcaagccggacagtaacaagcaagaaaccaacgcacgactgcattcgagcttctgcgggacaggcccagcttgggacctgtcaaaccgaccaagttctgtggctggtggcaaagaaggatctcgtctgtgcgctgccgaggccgttggatgaaaaagaatgatgcgtccagcagtctgcactccgccacaagccccaggttgctgggaccatcgcgtcctccgaccgacaccgataaccggactgtttttgatttgggagagaggaggtgaggctggtgacgtggtcatcgagagcagctgtccatgtccttgtctctggctgcctcccagttttgctcaccgctgatggcaacaagaagtctcttccaaacgcacgccgaagcaaaggacacgcaactcttacgacgacggcatggcgaaaactgatggatgatatgcttcatatcagaatatcaagccggctctagccacagacgtgccattgatggaggcatctctggaacctgccgaatggcatcatctgcgaatccctgcccgttctttggtcagtggcacccgccaaggagggtgctggcaggggcgcctacccggtcgacagggatcctgacagcctcattggcgggggtgaatctgcaatggacgggatctgcatcttcttcaggagtcctcatcagtaacgtgatgtcgaagtggtgtgaagctatcgctgatatcttcaccttttcaaactcgattgcccttcaggattcactcctgcagcagaggataacattggtgcagcgagctgcatattgttggtccctccatgcgaccaatgctacggggcaacttgatatgctcctatcaactcgtgatccctcccgcttgccaaaacttgaacagcgagtcggccgccgtcgttggcagaggcagataccgactgcttgggtcaaatcatccaacaatgagacccaggatagcatatagcgccccaggtcttcgccagccacaaccagcaacccgggacgtcatgtgccttttctgtcgccagtcatatcaaggaccgagtcttgttctctttccagttgaccagtaactcgtgcttctccaatccagtcatcatcgtcatggcttgcatactccagacaatccaccgatctacacaaactcagctggacaggctcatcatcctccctcctctgatgagttgtcagaaggacaatagctttatccaagccagaaagatatcaacaaaatcctgactggaattcctcacgtgggctgatccggatctagtgatccttcaccccctcctctttggactgtcatcttttccgtgccgccgcgcttaattctcccctccacacaccaacccttagcagtctcttgcccaacgacatcgtcaactggttcatgtctcacccctcaagaccgagagcctagcggcggtccttacctttacccattcccttcccgctaggaaaagaaacggccttggtcatagtccctagcggggcatagtcgaccgatttcctcggacttggacaattcctacactctcaatggccagcctccagcggcgcggactgctttctccttttttgatgcattccccgcaatgttagccagatttcctctccgtactatactcgtattctccatcggctgccggaatgtagccccttgctcatacttaggtttgactagggagaatgactgtttacaacgtgcactaggaaaatgacgctcgtcccgtcccttttgcgagcccaggcttccctttcttggcttcgctgaaaaacaaaaggcggccactgtgccgccggctagcttcggacaaggctggctgagtgctcgagtgagagaaggatagaggggtcaaagttgaccaattcctacggtttaaacatctggtttaggggagtttgtctggttgataagaagcaatgtcagccagccaggatatcaagccgtcgacgtcagggccggtagacaactgtccatttatcaatggagagacggctttgtaaagagagctgatactctatcatcgagagggtgggctgtaccccatcggtgtacaggtgaggctgttcttgggtgggggttcaaggaggaattggttgccggattggggactgtggttactactttgggagggggggaaggggatggagggggatgatatcatgaggggtggtgttgatggttgctcagctgtgggggatatcagtagttgtgtctcaagtgagaggtggcttttctcagctttagcctcgccctatgccagtcttttatcaggcggtgatggcatccttgcactcatgcctacccacgctcatagaggcgcttcccttttctgatggtctctcgtagccagcaaaggctgcctcagtcatccgcccccaactctcactacaactagacttcagccatccactctcatactataaagcttgaacggaatcatatgcttacaaagatttcatctcacatcatcatcttatacacacttcacccatctccaagtacaccctccttccctataccaccccgccaactccctaatcatcctagccaactcttactttacaccaaactacagaaaccagatatgcaacctgcttaccctaaagcctgaatcccctgctgcatcaccacggcaacatcaaggcaagacatacctaccgtcctcaagatgacatgcatgagcagaacgacccacaaagtcagaaccgaatcggggggttttgaagctagattcacttcaaggcatattttgctttacgactgccatcgtcccgtctcatgcaagtcatttctcatcatcgcaagtgcgagaatggcaaagtccgatattctatgcagccaagacctgtgattatgggaggatcttgtcaaaagacttggaacaagcagactggaagaaggtatggcttcgtcggaaaactcgatgtaatctgaagccgaggggtggaagggggggatgaagttggaaaggggcggttggctaggagtggaagtctcacatgacggtaccagccagtgaggacaaagcttcctggtttttttttcttttctttttttcttttttttttgacagatttagagtcaggttcgacaacacacaactgaaagaatatgggcatcgaatattgacatcggagccgggaccagtctctagtatttgatctcgtaacaagcctatcctggatgcatgatcttgactgtagtcgccaatatcaataccaacactactattccaacagcaaaactatatgctctcctgagacaggaaaagggggctcctagaagcgatgctaggaaactttgtccaaaataacgcgtagacacctgtggcttgacctgtcaatggcagcgacgcgaattttgatcattaccacaacgtcattctaggctggaaggtccacaagggcgacagctacgttatgtagcctcgaattcctatcgaaatttgagggggatggttaagaaacacacgggatacctgcaacacgattttcgtcttctccatcgtccctcgataatctctccgaattgatgaaagcatggaatccatcgatctgttgcaacaatatgttcatcgcctggtatccatctcgttattcttctctcgtacttgccctcctcgactaaattttcgtcatactccagggcaagatctggtttcatcaaaatcgctacctgatactccatattccactatccttccagaagcttgacgatcgtgacagcatgaaatcaatatttctcaacatgaccaagagattgtgtttggaaagtcctgaaaccgtatataaagcccagatattaagtgtctacctatccttggaacatatttctcagaaagatgctcctcttggattagtctatcatgtccaccacaggctggccgttgagatatgctgtgttccagaactgcccaacctctgtcatggtgctagatcaaccagcggggatctatttgttccattgaattcttggagatccactgaagtcttatatctacaataccgctgcaactaatggcgatcgtattctgattagagctgcagtctttttaagcccgaggtatgtttcttaactgtgcaaggccactgagcagcctcggggtctacctgagctacccatccgacaagacatcgaccctggacagtgtgagggtacattcgtcagtacttgaggcaaaccagggttttgtcaaatgaacattaatgctagagtggaagttgccggactcatcttcaaagacaatcaccgggctaacctcccctgcgtcagctcagcttgtttagaatgtccttctcgggcaatgcttcatttgtgtaggttatgcgccgatcgtctgcatttgtgtagtttgtgcgccgatcgtcttcatttgaccaaacctgcaaatggcctttcgagcctgacctcacttcaacatgatgctaccccgatatagcctcagtagtctttggcagaagagggcccttgattttctttcgagttctgtgtcatatcagctgaaatgtcacctaaatcgacatcatctccactgtttgcacttcatgtaaacaggaacttccgatcacctcaccctgttgtagacacaattgtaagcatgcatgaacttgccctgctccatcaaaacaccccacgcccattccaagctccgagatccaacatattgttcagtagtcttcatacctactctgtcagtctttggatattactctgaaaactgtaaaggggtcatctcgcctccttcaccactagagccgatccacattatcatccgctataatgtggaaatatcccgtcaaacatagctgatagcatcataacttggaagctgagcatcagcttacatacatgtcgtcttcacgaattcacgtgttgtgatagaccggtctgggcagatcgttgaatcaatttcccttggatccaaagtaaataccccggcgctcgcaagaagccaggcattgcgatgagtcgacttcctggaagccaactccatcttcaaccagttctgtccctgccctgtcgtggtgtaccttgttgtctgtctagcggtggtttatcgtcgttttcacttctcaaccggatttttctcagctgtaatggcttcatatggtcgagggtttctctaccatttatggttgatgttcttcggctttgggagcacagattgcgttgatcagcgttgtctctgcgccgaactaaaatgtgttggtcactcacccattgtgatgttgtctgggctcttgccctgcactgctcggcggtgcctgcccgctctgggtacgcggctctgagagcaattcaagtctttgtgtccgtcgtctcacgcaggtgcaatcagaagctggcgaggaagaagagggcaatgatgatggggcccaaggctcctttcactttctttacacatcactcgcctcaagctgccggaagtgcacggtaatcatgtcaagattatcttcaggaaacatgcttaccttatcgatattatcaatgatcattaagctacactacctcgataacacaaacaaccgcactggcataaactactgtgtgtcaacgtagtcccatcggattttcattatggccctaaaatgatgtctaagcaggctagttggacttacaaccagggaaatgttactatatccatacaatcaaatacatctccaagctagccacatagcctgccttctccatacccgttaaccaataataggtacgggccttagaaggacagaaacacacaccccgagaaacaggcaaggcctctgcaaaaaactcaaatgcccattcattgtccaagaagacgatgtcgacatgtaaacagcctggttcatattaaggacgcaatatacctgtcaagttacacatccccaaactaaggtcatacccaaacttacgatttccaacccttcccaagaacataacgaccctcaagagaataattccacacctgtgtctagaaagctaggctatactcaagatgtaaacatgtctgcctgatgtccaatgacgccttgatcccctcctcgcaggccttcaagttgtccaataaggcctgtcaaatatcgaagtaggccttaaacacgttactacatgcatccttaagatagatacacgcgtaagcttgctatctaaatgcctatcaaccgatcaatgaggccttcaaaacttctgaataggccttaggttggatgaccaggaaatggaccacatgtggatctggtccaccaccaccacaccagccacacaaccttgttgagattacccctgaatgatcacactggccacaacaagactaatattgggtcaatttctatgggagttataccaaaatgtagctcaatcactgccagagtcagacattgcatctgcttctcgcttgcgcctggtttgaacccgatgacgtgcgctgcgccgcacaggctgggctggctctggctgctccacatcctccttggctaccacttcttcctccaccaccctcccttcaatgcgggcctcttccagttcacagagcctcacaaacttggaattcgagtcttctctattcaacttacgcctttttcttgcctcctgggccttctgggcgttctgttggtgccttgccgcatcagctttgtggatggatgcctcagatctcagtgtgagtatagtactggtgagagtccttaccgcaagccgttttccggccggcgtatggttcttnnnnnnnnnnnnnnnnnnnnnnnnnnnnnnnnnnnnnnnnnnnnnnnnnnnnnnnnnnnnnnnnnnnnnnnnnnnnnnnnnnnnnnnnnnnnnnnnnnnnnnnnnnnnnnnnnnnnnnnnnnnnnnnnnnnnnnnnnnnnnnnnnnnnnnaggttccttgtaggggtaccatcaatgcggtgcttcagggtggaacgtggaatcccgtgcttgttggacgcttttcgctagcttataccaacggcaatgtctttctgggcatttttaacatcctcctcggtatatttggtcattgttgggtacctggagcaaaaaaaagtaaaagaaaagcttcatttttggtctctgtgggtggaatataaagtgtgtgttgatatcggggggctttcggaggtccagggttgtggagggtttaatgtgggtagatggcttgtggtagttcaaacttacctgggccacatccatatgtggtccacttccttgtcatccaacctataagatagttcagataccttcaaggatagttcatatgcatcagaagaaaattcatatctgttaaaagatagttagtatccatcaaaaaaacagtgtgtatgccttgaaagatactccacaggccttcagagatagtcgatatgcctcggaagatagtcaaaaggtattgataatatctgaataggcctattgttcaagattgaagctgtataaacagaacatttacgcctgtcgattcaaccaagaggccttttgaagttcaagtgatacgtacattttagatcttgaggcatgctgaacctgtcacaagcataccttgtgttcgtcatgcgaagaggcatcggaaaaatcacaacataaattacatcacaagtcctagcacaagtcctagcacaagttatagcacaagtcacagcataagtcacagcataaggccaaaaagttgatcagaaactctgtatttccgtctaatcctggtaacatgctcctcctcagaccatgaccgatcccgatgtccttgactaaaagtacagaaaaacgggcgccgtcgtcctcaacaacggcgatgtggaagttgctcgatcggaaaactgatgcaaatttgaaaaagagaaaaaaaaacataaaggtattgtcattagctagaatccgtccaactccgttcccaagccactttttcattcccagtcattgcgagtcgtttagtcaacctcctccatggcgttgtcgctggtctcagcagcggcaacaccggcatcggcggcgggagcatcggcagcagcctcgggctcctcgtcgaggttcaggccgagagcgacaagcttgtggatgcgctcagcgaagccagcgggctcctcaatggtgaagccagagaccaagagggaggtctcgaagaggagctgaacgatggacttgacggtcttgtcgttctcgccgtcggcctcaaccttctgcttgagctccttgatgatggggctcttgggggagatctcgaaggtcttcttggaggacatgtagctgctcatggaggtgtcacggagagcctgggccttcatgatacgctccatgttggcagaccagccgaactggccagtgcggatggcgcaaggggcgccgaccaatttgtgggagacaacaaccttctcgaccttgtcgccgagaacgttcttgagagccttggcgagaccgtcgtactccttctcctcagcctcacgctgcttcttctcctcctcggtctcctcgagctcaaagtccttggtgatgtcgacaagcttcttgccctcgaactccttgagctgagtcatggcgtactcatcaatggggtcaacaaggaagagaacctcgaagcccttctccttgagagagtcaaggaagggagacttggagacagccttgatggactcgccagtgatgtagtacatgttcttctggtgctcgggcatgcgcgtgacatagtcggagagggaggtctgctcatcgccagacttggtggagttgaagcggaggagcttggcgagggtgttgcggttctgggagtcctcgtggatgccgagcttgatgttcttggagaaggcagtgtagaacttgtcgaactgctccttgtcctcggcgatctcagtgaagagctcgagggccttcttgacaatgttcttctgtagtggttgttagccatctgggggggaagggggggaaattgaagagaaaaaaaagagattttcttttttcctctcttcttttttttcttttcagaaaagtaagggtgatcagtatgcttagaaaaacttacacgaataaccttcatgatcttgttttgctgaagagtctcacgagaaaggttgaggggaaggtcctcagagtcgacgacacccttgacgaagctgagccactcaggaatgaggtcagtggcatcgtcagtgatgaacacacggcggacgtagagcttgatgttgttcttggtcttcttggtctcgaagaggtcgaaaggagcgcgcttgggcacaaagaggatggccttgaactcaagctgaccctcaacagagaagtgcttgacggcgaggtggtcctcccagtcgttggagagagacttgtagaaggcggcatactcctcctgagtgatgtcctgggggttgcgagtccagatgggcttctgcttgctgaaaaaaggaaaaaaagaaaagtcagaaaaaaacaccttcataatttggttgggaaagcgggaatcttacttgagctcctcctcctcagtcttgacctccttgaccttcttggtcttgggcttcttctccttgtcctcctcatcgtcctcgacctcctcgatcttgggcttcttgtcgtcaccctcctcgacggtctcggcctcctcatcggggacctcgacctcggtctccttctgaacgtggaggtagatggggtaagagatgaactcagagtgcttcttgatcacctccttgatcttggactcattgaggtaatcagtctgctcatccttgaggtggaggatgatcttggtgccgcggccaatggaggggccgttgtcgggggagatgttgaaagtgccaccggcgctggactcccagatgtactgctcgtcatcattgttcttggagacaacggtgactctgtcggcaacgaggtaggcagagtagaaaccgacaccgaactgaccgatcatggaaatatcagcgccagcggtgagagcctccatgaactgcttggtgccggagcgggcaatggtgccaaggttgttgacgaggtcagccttggtcataccgataccggtatcctggatggtcagagtcttgttctccttgtcggggatgatgtcgatgcggagatccttgccagtgtccaacttgctggggtcggacagagactcatagcggatcttgtcgagggcatcggaggcgttggagacaagttctctgaggaagatctccttgttggagtagactgtgttgatgatgagggagagaagctgagagatctcagcctggaactcgaaagtctcagccatcttgaaagggtatctgaagtcgaatctggggtatctgatcgatttgagtcggttagaatcgtcgcctggtggtttttgcaaagtatttttcttgtgtgatgtagtggcttgaagaaaacaagacaatagtgcggggtggaagggttcgagcgggcagccccaagctgataactctcaaactttaaatagccccgccgttcacaaaatcccagcagatgctctgtccgataaggcttcgaaattgcaattgcaataagccacacgatagagctttgtttgttgggtgcgattggggagcaatttcgtagagagggaaggaggggcaggccgcaaggctgaagaatgggactggcgactgtaagaggggcagcgacttaccaaaaggggatgttcgagtagtctacgatctacgcctagcaggaaagatctggcagggcaggtatgaagcagagagaagagaggaaggtggttgttggtctgaagatgggaaggaaggaaggagaggacaggaagagggaggagggcggcagctaaaatgtctttggaggcacccctgggctgtgctctgcagtgtttctatgagattctatcgcccaaaattctaccatttctctgtgattcgtttgattcggcctccacagcaacggtccgctatgctgattggcccctgtgccagctccgctcaggcaacttccccccacctctgcggctgccacagcaaaccaccaaactggggtcgagaactcaatggaagtcgtacagcgcttctaggctctctcagaatgccatttccatcacggtgagcctcactggagccatcttggcatggaaatcactgatcgaagtgctgtcctcccgtcgctgtcagagaaggctccagaattcccgagacgcccagcgaggctgaaaacgaggctggcccctgttccacctgccaaccccgcgttggttggcccgtgcatttaggagtcacaaagaagatgggacactggatcaagcaactggtgaaagctgacgaggccgttacctatcaccgttgctgcatgttcagatggaaaggcaaccaaccccaacggccaggtgaggggtggacctccaaggctacctgagtggtgccttccttcgaagacattacccctgaaggttgtttacttcctttggatttctttggtcttgcgtttcttacgacacggcattgcagacacacacagtaggataaccagcactctagcaggctttatgccgggtcctccgtatcccagagcaacggccaaagttgtcaagtagtagagagcttcgctctcgccctcttgacaacggaatgaaaccgcagaggaaatagtaccttagggtgatcaccgctggcgtaatgccttctgcaagtataccatgggctcttgtcggatttggtcatgtccctcgatgtggcggcgaaggagcctcaaaagcaccgtcaacaggctgaggttgaagctggtttgatttggccatggggtatgaagcagagggttacttatggtcagcttctcgcaactggcagcagaccatcttgcctttcgagtaagatggggaaggctcattataacggtgactacaagccaattgccagatttcatcggtaaagatgtcgattctgagagaatgataggctcgaacagcagcaagctccttctccatggtatggcttactgtttgacacattgtcagccagaatatgtggtgccagctcaatatatgggtttccaccctatagtatcatccagagttaagatagggtttcagtggcagttgagatccagcacacctatctgtcgaggtgttttgtgcttgtgaaacagaaatatcatctggaagtgagcacccgggcggctgacgtggttcgtggggaacatgtctgatgtgttgcgctgccaggtgacaaggcataacatactgtgccggctggttttcgattgatagcaccatggcaggttggagcagcggcctcgttgttccctagctatcatttggaatttcatatgtcgataccttatagacacaacttacacaagttgtctgacaaacttcaacccgacagtctaataccaagtgatggtgtccgatagcaaatctgaatcacttgatagcaagttttgttgagtagaagctgcaagcctcacaagaagtgtattctgtagaataccgagatgtacggagtttaacttattctcatcaccaccctcccatttatgtccttgtgcaaaatacaagcttggtgagagcagataccgggtccgtcggcagcttttcgtgctctgctgtctgtccgcaaccgtcttctattcctggagatcaacaggaccccaaggacttggcaccggtcgcaggaagaaacacgtgcatgaatggttgcacatccacgacgtctcaccgacattgctgatgaagcacaggggagatgaaccaacccctcatgtttgatcctttggtgagtgagagattcagctgtctggttcgccgtccctgtgctgttcggccgctaagcgtagccccgcccgaccttctggaggggtgacgcaatcaggaaagaggggtgccgcatcgcggggcggggagcggcagagccaggggggctgagctgccgtggggagagagagctgcaactgcgggcaagcttttggggggagctgcactttgtgccccaccttgccagtgttgctgctttgcctgcctggaatgccactttcttcaaccctcccaccccatttaagagcttgacctgcccctccaccaagccccgctgatttttctccccttttccatcatgttcagaagttccatcttccaagctaccagatcgcttcgtcaattgactactccagccacccgcaatctttcattcacagccgccagaatgggtatccccgccgacgctcccgaaggtctcaagattgagtcccagaacgctggctccggccctgaggtcaagaagggtaagcttgtcctcctgtctcttaagcagcttaagcatagtatatcatcaaagctaacaccaattgcccacaacaggtgactccgtcgatgtccactacaagggcaccctcgaggacggcaccgagttcgaccagagctacaagcgcggccagcccctcaacttcaccgtcggcgccggcatggtcatccagggctgggatgccggcctcgtcggcatgcaggttggcgagaagcgcaagctgaccatcccctccaacctcgcctacggcgagcgcggcattcccggtgtcatccccaagaacgccaccctcatcttcgagaccgagctcgtcaagatcagataaatcaacaatccaaaacacattacaaggagggagcatatatgtttgacatttcgcaaagccttacccccttatgcttactagatggagcaaaacgaaaatcgaatcatggtttcactctgggctagacacccaaccacctatctcaatgtctcctgctcggacaatctctatttcttttgtacaggtgaaatgctcccgaccaaaacgccaatgccgtgtggatgcgaggagatgacagcccaaccgccctgaatgatatctacacatacaattccctgactcgtagtcgtcgtccatgtcccgtaacccttttctaaaccttttaggtcccaagattgtacaagaacttcgctctatgtccctactcatgcttccgaagcacatgttctctcactattcctcaccatccttcccttcttccaccccctccccaggaataatacacccccctaactccctatactttctatccgcatacatcaacccaaacttgtcctccttcccacccccattcacctccagaatctccttcacctcccccaaaacaatataatgatccctcaccttcaccaacccccccattggctcctgcaacagctcacagcgtaagacatataacacgcccggcccttttagtattggcgcctccccttttgtctctgtctcgtaggagcaaccacattcggattggagctgctcaaacacctccagcccggctgcgtttcctctggcaagccagtcggctattctcgcgccggaggggtcgtcggtgaggatgtggatgttgaataggcgggaggaggagagggcgtcaaaggtgcgggagggggtggcgatgttgaaggagatgatgggggtggggaggagggagagggaggtgaaggaggacattgtcattgctcgggggattgaaccggaggaggaggaggtgcagacgacgacggagtgggttattaggcgcattagggagcggaactgttctggcagggggagggaggtggaggaggaggagtgagggtggattgaggggggggttgggagggaggtggtgaattgtcggaggggatggggggttgtgctgagggttcgattatgaggtggtttatgagtgaggggttctgaggaactgttagaagagacaaaggatggagatgtgaggttcatacgtgatattggtgctcttcgtgggtgtggtagaattgtacatgatggtacatgccccttgttgatatgttgttgactctggatatgcagccggcgcataggcattggctttgcgcttctcatgctcaatgttggtgctgtgatgacggcggccgagttgctgcatctctctgcggcagctttcaagcccaccgtaattcgtgggggggagttcatatttttgacaccatatactgtctttccgacttccttcaaagcaaatcagacgaacttatggccaatgtcaaaatctgttgttcatctcagtcgcaaatcggcttcttccacttccacggccttgggtccgtcatcgaacggctcccacccctgcaaataaagttatcgataagctccgataagctccgataacaaccccggacccttgctgagtgggctctcaattgcgggctgccgcgggttggagctgtgccgcccgccgcgagttatcaaaatttcgaaccaggggaaccaatcggcgcggcaagcgggaaggacgagtaattgaagatttggagacgacgacgacattggcgatagggacaacgagagatacctccagcttttattcccacctgccccgacggcctcgaacccgaatcaaaccgcaaaacccctcgctccccggagccctcccacagtcacaatggccagcaaactcccaccatcagccctccaaaccctcaggcgaccatccctcaacatcaacaacaaccacctcccctccccaatacctcaaacccagctccgccacgcaaccttcatcccccgccaccgccgcccctacaagttcacccagctcgtccagctctccgacggatcgacctacaccgtccgcaccacctcccccgtcgccctctacaagtcggcaaaggacacccgcaaccacatcctctggcagcccaccgacaagtccctccgcaacgtcgaggtcgacgaggccggcaagctcgccgccttcagagagcgctacggccgcgggtgggacgccgaggaggctgccgtcgagcagcaggaagctgcagcaacagaaaagaaggcagaggaaagtgatccgtttgacagtcttgttggtttgatcagtgatttcgctgccggatcaacaagtaataccgccggagggttgagtgcaaaggagcaggcgaagaaggataagggggggaagaagaaataagggatgggggaaagatgaataaggaaagggaaaaccttgtattataacgctgtgggaatataaagttgtatttttggacagacaacaacaaaaacaaataccaaaagtctcgaacaaggggcaggtgaagtgatcatacttctcacatctatcacggctctcacaatgaaaggggggtgtacgagttgagaatgcttggatttaacatcacccatcctccagcgacgcagcgtttctaaatactacagcaaaacccattcaataaacccatgacccatcgcctgccgcaaaactacccaatacactgtaacaaacctccaacagtccacctccaagtcatcccacccacgcaaaccccccaaacacggcactccactcactagtccacgaactcgacgactcctccctccttgccttcccaccaccactgtggttcgtcctatcccccaaactgctcgggctcctcgaacgccccccacgaccaacaggaccatcagcaaacgactaatccgagtcctcatcaatcctagcacgagccctatccaccgccgtgttgccagccggcttgttggcctgcacaaccggtggtctgtaaaagacagtctcgtcgtcctcggcgtcgagctgcatgaggaatgtctcccatttctcgataagctattccaagacgttagtctcccatgtagccactgatcatataaacgggtaacaaacctccttctgagcctcaaccgcactctccaaatacgtctccacggcactcttgaaatcctccaccttctccctctcaaacctgtccagttccgccctcatcaaccgccccatatcgtcaaacaacagccttgtctggtgaaccttcctctccgcgtcagcaacctcagcactgacctggttcagcctgtcctgctggctcttcccctgtctcagaagcttatcctgcgccgccttccgcttctgcatctccccctcggcactgtgccagctgtgaaacgccttctgtctctgcaagaagctctgcttcacactcccgatcaaccggatatactcctcaatgataatcccaaaggtcagcacatcctgttgggcctggcggtcgtaaacatcgcgaatggtgagctgcagttcggataacgcatccagcggccccgacagcgtaggcgacagttccacagtagacaaagcatgcaagctcgccgaaaaatcccccgccgcctccgccatagccttcctctgcagcaccatcccatccatcgccttcagcaacgccttcaactgattctccagcgcatccagatacaccctcctctcatgaaaccaatcatcctgctccacaaacttgctccccccacccccaaaccccaagcttccaagcacccccttggactccccccccaaattcacctccttcctctccttgtgcttgacatcaatattgaaactctcactctccagaaacagcttcaaatccccatccagccccagttgcggatgccccgcaattttatttagcatcttctccaacgccgccctcctcgcctcgacaaaattactctcaaacctccccaccgcctgcttctccggaggaggcgggacaacaacaccgggattgttgccatgaagcgtggtgtaaagccacaagaaatcgcgataccggcgcttgacttcgaattcggggtttttatacgccttggaggtagtctgccatcccgttaacatccttacccccctccaccccctatccatttcccctcagtaaacataccttcgtcctaacagaataaacgatatgactactagtcaaatcccccaccttgtgcggatcccccaccgtgatgctaaacaccggcttcgccgcctgctcaacactcacactcggcggcgcccccgtcgtcgtcctcaccgggctaggcaacgccccttgcaccggcgggggctgtctcggtccagaagcagcaaacaaactgccctcgtcatcatcgtcatcgatcctgtgcggatctggggggccggctcgcttggcaccgccaagaggagcgggcattgtggttcggagggggagttctttcgagggcggcaccgggggggagacatcctccgcggcggcgggagtggtcgcgggcggggtagctgctcccagaggaccgagggggtcatcttctactgcttggagctgggtcggtttggcgatcagccggcggggtgtgattctcgacgggcgggaggaagaagaagaagatgtgggagctgccgtcgccggcgcgggagcggtgctggtggtggtggtcgagggggttgtggtcgtggtcgtggtgtcgtcggtcgcctgagaggtgccggccgagtcggcccaggggtcctccattgttaaatggctgtaaactgttattcgtgaggtcgaggttgaaaaaggctgcgcaagaaatgctttgaaagtgtgagctggagacaatttacacggccaacacctcttgcttagtgacgttcgatggagagggtaggtgtctcgagctccgagttgggaggtgaggtgtgttgcgcaatgcaggcaggtagcgcatgctcccgacccaggtacccaggtaggtcgttgaactaagcctttcttggcagccatcaatgtggggttcggaggggggagcttccccttctccttccccagcacatcaacatctggtgccattcaagtacatatcaacagcgtgatacggtttcgtgattatgcaatttctcaacactgcaagagataggtgtttatcaattattaccatataaaaacagcagaccataacgccaggctcagcttctcgcccaataaatgtatctgcttcccaaaaccgagaaccccttttattccctcgatcatgttttgacgccgatataacccaaacgctacttcaaaccccagctacctcccttgaccttctcctaacgatcagggtcatagcatcctccagccaccaccaagttcatccgtgtaaacgccaccttcaagaccggagtcttcttggtagggaacgcgctgatttgatcaggagtaacctgaacctccttcgacttcttcttgccagacccacctccacctccaccaccactcccactaccagccccagaggtgttcgcacctgtaacctgagcagcctgtccgccgacagtgatggaccgattgtcaccagaccccgccaccgcaatgctgtcactggcaacagttatcccatcaggctgttgacctggctggactgagccgccggctaagggattcgccttgctggggtcggctggcagctcgacatcccaaactcgaaccgtgccgtcaagcccgccagagatgagaatattcgactcggcactgaaactgagagatgggatgccgcccttcccgtggcctcgcatcctcttgattcgtttgctcttctcgatatcccaaaggaaaatattgccacctgtgtcggcgctggcaagaatctttccgttgggagcacactgcaaggcgctgatgtagtcggcatgtccggtataaattctaacgcagccgccagttgtgagagaccacatccgaatcgacttgtcagtttcgtcagaggccgagaagacatatgttccgttgggatgccacgcaatggccgagatcggggtgtcatggccgaccataatgcgctgagccgaagcatgatcttgggtgaagatacggaccgtcttgtcccatccggccgtggcaaagtagtgtccatgtggaccccaaagcacgcgaaaaataggaccgtcgtgagacctgtagatgcagaggcaagaccaggattcgagtgaccacaggcgaacctgaccatccatagaacaagacagcaacagcttcgcgctggtgtctaccggcttcccggacccttcaaggtagggattccggtcaagggaagcggtggaatctgagaaggagataccaaagacaggacccgaatggccaatcagcttcctattgttgaccttgaggtctttttcattgtccagcgttgtccgaagcggtttgccctccagatcccagacgcgaatgtaggaatcagaggtgcccacagcaactagctggtgatcgttggagaattccatgcatgagacgctacaagaattgcgattagtacaatggtcagccactcaccccttagcagaccagaaacttactttccgagcgtgttatgaaaggtaaacatgcaaactgacacaggcactccaactcccccagtacgaccctcaatcaggaacctgtcgcggttctcgcgcaccttttgcatctccatgacgacatccctggctcgcgattgtgggagaggtaggtcagctcgcgatggaacgtcgtcaccctcttcttgcttgatgcgtttgtcaaacacttcgaccaagctgggtcggccgtccaccggtgggtgcgactggtcttcttcctcaagttcaatgcgaacgtcatctctgagctcgggttccataggcaatgggcctagtttcaacttggctgtgttgtcgaggacgtcgcgattcgcaacgccagtgaagacgccgggaatgccctcttgcgcgtcaatctcgtccaactcacggttttgggtccgacggtaaacggcctcgaaactataaggctcgatcggaccacgtgagctgttgtcgattgcgcagaaggtttgaagaatgtagatgagggtgcttccgcccgaatcggagtcgcgctggaggaactgaaacaggttgagggtcagagtgttgttcagcggaatccggtatttgttctccttatacaacttgatcgtggggtcctcgttcatgtgctgtggcagggtgacagtgctgagcaacctcagtgtgtcatggtgaactgtctcaaagtgtggccggagagtcgcaagataagtttttgaatcctcatggtagccctggccaacaagctccaggtaggagtagacgaagatgggccacagaagcttctcaagctcaaacttgtagatgtccaagttgttgtcgatccagttcttgatgagaatgaacgccttgaggtacctctttgggtcggcgggatcttggcctcggtttgctggtctcccatctggaccgagatgggcagtctcgatgcgaaagacagcctcagttttggtgaaaccctttttcttcagatagtcggtaacctgataaatcgcccgcgcgttagcatcattaccaactggcttcacctctctctccgccgcttgactgctttgtacataatagcggttacgagcttccacgacttgttgggtactcatcgttggcctgctctgagaacttcaagttctcaacaaggctgaatggggcgttattagtcgaagatatcgactctgaaatgtaaaatggcgttcgatggcggttgaggatggggccagaacgacggaaacggtgtggctttagggtagcgaatgaaggagttggggcagaacaacgagagcagagaaatcaacctacaatctgattgaggttctgtgctgatggggtgctggtcgtcgccggctgtgagggagcaggtgcaccacctgccgactgtggctgccccgaatatgaggcgctaggcggggcctgacctgttggttgaggtgggggatttgacatgatgaatgctgggacgaaagataatagataataataagaattgaagcaaaagtggacgttggagagagatcacacacttggcggggtcgcgcttccccaacgcgctctacttcatgaaccagacgccttctccgaagccagcgcaaagcttggagagttttgatatctctgaatcgagttttatcgtgatctaatcgtttgagctgtttgtaagataagcagcacttatttttgatgcgcctggtgagtgaagatatacgaccatgtatctcttcaacttatactcgaccgctgtctccgtctcacagtgattgaatggatcgaggtgaaccgaccgcggagttttccgcgtttgtgtcgagccaactccctgtccgaggcccgtgcccgagctccaccccttgccgttttagcgcaaagaccccggtcctagcttcacgtcacattcactttcgcggggcagctctgagcttgcgatcttgaactctgccataagcagccacctctttttactcacaacaccagattcttcgcacatcaaattcttagcaaacaaccacgatccaaacaatcaccactcactcacccaccccggcacaccaacaaccaaccgcaaccatgaaccccccaccccccaacccccaagaacaaccaatcgacatccacacccccttcaccctccccgaacacctttcccacctcgcctccacagaccgcgacatcacctccctcctaacccccgtaatagcctccctaaccgccctctccacccccccctccccaaccagccccaacgccccccaagaagccttcaaatcagcccaaacatcctacttccgcaccatcgaccgcatatccaaacacctcaaccgacaaatctacgccctcgaagaagcaaacatcatctccctcgccgccacctcctccaaccaacaaccctcccaatctgccgaaaaccccgactcccaacccggcgcatatcagcccgacggcaccaaggataccaagaaagtcgcccgcctcgacccagacggaacaggcaaatacggcaagctcgacgtcggaaggctgaacttggcttcgtcaacgacagagagggacgtcgaggccgagacctgggagagggtcaaggcgcattttgctggtatggccgaggcccagggggtgaataccggtgacaggatgcaggagtaggatcaccgtcgtcggtctgtcactttgggaagggaggaaggcgtcgtggtaagggagttggcaggtggtgagcgccatcgctcggtggctttggggcgagaggagggtgttgttgtacagagagagggggtggatattatcaaggaagaggataatctcgagtatggcgctttcatcaaacaagaggctatcaccgaccatggtgtcgccatcaaacaagagggtgaggacagcttagaagtccacatcaagcaagaggatatataatagccgtcgtctaaactctcagagagacgggtcgattttccggcaactcacatcagagagaagggatcgccatagatggacagggtgcattgctcgcggggcatatacattggacaacagccgttagagatatttgcattttactggagttttaccatggagatacccagacatcaggagagtcacagccatggcctcatagagaatcagagatggagacgcaataaaactcttggttgtttgtctcatctaaagctgccttttctgtctagaaagtgatatcattgaccccctctttcagcccatgaactcatcccccctgttcaggtcgacttgacatgctccttgcaaatccgatcatacgccccgccagcaacaaagccagtagcattggtagaaaccaagaccgactcggggatgctataacattttcactttctgtaagcccccatccaccacccatcaagatcacaaaaaacttacacagcatcaaacagattacacttcatcgtctcccccctccccttctcatcacgagcctcaaaccagacaaaatacccattgcactcctcctcggcattgcacaaaaactggcacttccacgccccaaactgtccctcggccgagctgtacccgaaccagtgagggccagaaacgaggtgcttcttataccaagtcttttcgacttggtagctggtggtcttgttggaaggagtgacgagggtgtaatctccaatgttgaacccgctgtcgtcgttggaggaggcggcggggccggtagtgcaagctgctggggcggggaaggcagcggtgcctgtttcgaggtagcttctcgaggagtgggggtgaaaggagcggtagacttcctggggaggggaggatgggacggatttgtagatttcggtgtcggagtcggtggggttcagggagattaacttgggggataggaggggggtggcggcggcgagggtcgccaggaggagggctttgaggatcatttcaggtgtgggattggtggttgtaggtagggaattgagtgagggtgagagttgttcgttcctaaaaccaggtagttaagaagttgaggttgaatgtggattgtaggtctccaagtttggtaagagaagatggaattgttcaggccgaagttgtaaacagaagttggtagagaacctgaagtcgaggactgccagatggtgagccaagaaagccggcagagccaggggaaggaaagaacgactttgagtaaggtacagtcaccgccctgaataaaagactcgagctttctgtgagactgctcgtgcctccctgagatagatcctttgccttgttaatgtgaccaaaggaacaagctacctcacaattggccgccattaacgttcacgggtctcgaagacgtctacactggtgcgctatcatcaaggaagctcctcaattgctggtggctgagcagttcttcaagccatactcgacattcgtctcacttgtcgagtcttgccaacccagtcttcgtcctcctgtccaagagagcaagtgccacaaaagttccgtccgtatacctatttctctctacccttatcgctcctttcgtagtagaagtatacccctgaggttcacagcagcacaatgacaggttccacaaagaaaataccaaacgggtgtaacacccggtgtctgatcatgttcgatctgtgcttgactgcctttaatgaggaatgacaggatattcctgtccttgaggcgaaatggttgctgccagcactttacatgagaccgaaatagcaaactacccctgacacaaggtgagccatggcaaaacatgcaaacatctgctcaaaactccgcaatgtttgctcagtcttttatgtaacatctgaaaggtcaattaggtttcctacaccatatctatacctaggaatactctaggcacactgaacaccacaactcacgcttcccatcttcccccctgctctcactccctactcatctcattctacaccgaaaaccccttccgtccctctaccaacccctccgcaaactttgtaatcgccgcccaaacaggtgaatatctcaacccctcatccaatgcaggaatagtccccgcctcattagcatcactccaagcacaaaccacctgtccctccaacttctcagcatccttccactcaacatcaacaacccacctctcccctctctgccgatgccacagcttcaactgcttaatcccaccctcagggaactgcccaaatctatcatcccattccgaacctccctgaacattgaatcccgagatgggctgcttaaactccaagaagcatgccttggtattgtcggcctcgatctccagctgggccttgttcccctcaccgcgcgtggcagtgacagtagcaaggctcttgtagatctcctcaattggcgtgtcctcctcaggagtctcacttcccagccgaggggcaacatcgaccccgtcatagcaacaactgaccagctccgcccgcttcgactccccacaggtaacattcctccccgaagccgacggcagctcagcaatgatcttgtgaacatactcatccaccccgttatagcacacccggttatccgccgtgtcgagatcgatctgttgaacaaagtacaccttgtaccgactttcctctgaaaacgggaaagccaccaagttgtaaatcagcgtgccaacaaacaccaccaacaagaaaaccggaatgtgatggctaatccgatgaatgaccggcgtaatgggcagcagaaccaacaccgtaaaggcgaaaacaatcaaatacggcagcagcaagttgctcccatcagcaccagtctgatgaacagcatccacgagcatcaatcccgtctgcgccgccaggataatcgtaaacggccccagaatcaaaaactggaaaaaccacagccaagaaggcaagcgtccagaccaagcctgctcatgctcaaacggctcgtcgccatcctgcccgtacttgcgagctccattgaccaacgctgtgatcgaacggcgatacgtcgtagcaaaggtcgtgcggaagtgctcgctcgtggcattaccaccgcccaccaacggcgtgcgctcagtcggtactgccgcgtcttcgtcgtccgtgtcgttaccgtctccctggcgcagagtggaagcattcgagtcccgcgtggcgggcggcactagagatggttggtgagggatctgcggcaatgggggaggggattcagtacgagtattgttgttgcccgactggggctggtaataatcgtgaacctcatgatcctcccgaacttgctgaccccaggcggtcttcttgggcaaggcaaagagctcgcagagagtgaggaaggtggtcaggcagacagcggtctgtaggaagacgatggggtagccggcaccgagcttgaagcgatcttccgtcacggttaccgcaacgagggtagcccagccgaggatgaacaaccaaatgttgacatagccccggtgaagcgcactgggtctggcaaagttggcgccgcgcataatggaccagaaggtgaagtagaagagggagaagatcatagcgatcctgctcgttgttagccacaccatcccccattaatccccaaaagagaaacttacacagaataccgatgactgtagataatgaaaggattcactttcctcatcaagaaggccaccgcaagcgacagcgccccagaaacaataaacgcgaagggaaaccgaaaagcacctttccacccgccgaccaacactggctcaaagtcaggctgatcatacgtcctgacgcttgaggtgaaaaagtagtacttgtccagtttgtgaaggatgtacgtggccaacaccaagatcagaggcgtggccaccagcaccgtcagcgaccaggcaaacatgcctctcaggccaaaattgacgaaccccttgccaaagagatcaaaccacactccgttgcttgggctgccattgcggaccttgttgcgggcgccatcaggccgagcgccaacaaaggtatccccagtatcccccgagagcttactggccgtgtggatagccgcgctgagcatatgccaaagactggccttcgacgtgtgagtagcatcgtccctattggtgtggtatctcgatctaggcttgaagaaagcaaggtcgagtcctcgctgcccatacacgtcgtaaagcaccgagtagtcagtaccgctcctgatgaacccaagcccaaaggcatcagaagcaatgaccgtgccgaaggggtccgaagtcccagcatacgcagccgtgacctctctgtccgtagtccggaaaagatttgcccgtcctccagcaccggcaccctcaagattcaagaacgtatggatatacggattcaacgggtgctgtcccagcgctctcgcaccgtacaggtaatcctcctcgccattgttaagcatcaccacaatgcccctttccggctggtgatccgggtgagcaaagtacttgatcacctgcaggcaggtaacaacacccataccgtcatccgtagcaccatacccagtcgaaaccctatcaccatcatcagtatcaccaacccctcaaaacatcatccatcgtaaagaactcacgagtcgtaatgcgcattaaccaacaccaagcccctctcattcttcctcaccccctccatctctcccccctcagcactcctcctccaccaatccccctcatcatcccccttccccctaacataaaccaaaatattcgtcccctcaaaatacgccgccacctgagcactacccggcgtaggcactacgctccccgccatcaaacccgtaacattgctcctcaaatcatcaaaaaccgtcacatttcccttcttcccacccaccccactcccctccaatatctcccccaccctccccagcaaataccccctcacctcctcgttaaacctgctgttatacggatgataccccctcgtgatcctcgtcaggtccagccacgcctccgtcaggttcaccccctcaatcttgccatcgtccgccgccgccggcgcaggggggaccgtctcgttgatgatgacaatcgggatcagcagggcgaggtagactaacgtcgtccaaaacgtcaccggccccggccggaacgagatggggttgatcatggtgggcaacaaacacaagagtgctgtgcttggctcggtgatatgagagagctgcttctcttcttggtgcggggaatctcaagacatgtgaaaaaagctaagagtgatttaggtactgcaagccaaaaccgccgtcgatagttcttgaaagggaaaagtcaataggtaacacgcgtgagtgggtggtcgagtccgagtcccaaaaggtgtgtgtgaaagatggtggagggggacgatgccgtgcaaccgttcgaggttcgccaactgggcagtctcgtctttgttgcgttgaggcaactggtcgggacggagccttcttccctttgtggatcaacacagttggaacccctgggaattcctgctgttttcttcttttgcctctgcaagttcagggcgagggcgatgtcggggaaggcgacgagatcatctgaacatgagagagctgcaagagctaggggggctcaaaggcggccggtgagtggggcttgccaaggcccgttgtgcagtgggcttgcataagaaatggcccaagctcctgctgatgtcactgagcagcagcaacaaagaatcacagtataaacacatgtctacaatactttgaatctaatgaaattacaagttctatgttgctgtatactaattagaccgttagttccactgtgcctgattacatgtaagccagacatcctaaccatcagaggtcgaggatccaataataatgaaacagctgagccaagcaacgttaataacaggtcagatccctatcggtcagtcgttccaccggttgctaccactaagcccccgggggaggaggaggaggcggcaagtccatgggcggaggaggaggtgcttcacccgcaggcggagggggtggtgggggagctgcgttggcgtattgctggatgagcgcgttcaagccgccagggaggccgggaggagcaccgcccggaggagggggaggcaagctgggaggcgcaccgggcattccgggaggagcaccatagccgccgtagccaggatatccaccgtaggccgcatttccaccagcaggctgttgccatggggccatcccaggagccgaaggtggcggagggggagcaccgtatgagttgtgaccaccaccaccactgccataatagctgtcaccgccatcgcgaccatcacgtccaccacgatacccccggtcatcacgatctccacggtcgccacggtcatcacgatagtcccgaccacggtctccgcgatcacggtcaccacgatcacgggcccacggtgcagggccacctgaaggaccgctgggaggaccaccataaccaccaccgccaccatggtggtcatcacgatcgttgttgcgagtacgccagggagcaggaccgccggttggggcgctaggaccgcgggcccaaggccgcgaatcaccaccagcaggaccagtaggaccgttggatccaggcccggcttcgatcatggcaggagcagcaccagtgccgccgagttcttgcatgagttgctgtagaacatggttagcatatggatatcaccaccgaaagggacgcaagggcagaactcacctcatactcgcgatccacagcatcgccgccgccgccgccgccgatacggccggcagtgcggttagccatgggaccatcattgcgccagctggcaccgcgctgtctatcaggacaatcacgagccatatgcccagcattgccgcaaacacgacagatgatgctggccgtgaagttttgcttctcaggacagtcatatttgcgatgaccgatctggccgcagttctggcatgcctggttctcgtcgtcacgcagagtaccgttcaaggcggcaagctcacgaagttgattgcgcttcagttcattttgaccctcgggaatagacgcagcctgtagccaacatattagcgggtgtcttcactccagtgcatacggggaggaaaaacttacagtctcaataatattgtgaatcagcttcttcgccttattcaccttctcctcggtatcggccatgatgagacagtggagatcttcttcctggttactggagtgagcggcgtcagaacgacctttgccctccttcacggagcccttgccgcgaattgcaatcttggcgccggattctgtctccatcttcttgagggtattgccgcgagggcctatgagtaaaccgactttaatacggaaaacctaagtgttagtcatttggatatcgtggtacaacgagttaggttagggctggagtttagcatgtagatgcccgcaaggcgcagcttcaggcattacgccgactgaggtgcctagcaaagcaccaatagcaaggaagggggtgtggttagagaggtttgagggttagcaatcatactgaagttaatctctggatagtcgttcacaggcacgtagaccttctcctgggtcttggttgggcgacggtagtccgagggaggatggtagttggggatcgtcttcatcgccttctcaatcagcttgtggcgttcgtcttcgagcttcttgcggtagcggtattcgcgggtattgacacggcgaccatggttgtcgtattggggcgcagggaggggcgatctaggatagtgggttagtatttgatattgaggacggaatagcatggtaaaacacacctgtctccatcagcaggaacaacgtcgtcgatcttgagtttctgtgtgatctcctcgatacggaggtggagagtgtatgcctcgagctgctcgctggtcatgttggcgacgatggcagtgggaagacccatcaagccagcggccttgttctcggtcgcctcgccccagcggtttctcttcttgcgacgtctcggaccatcatcattgttacctggacaagtcaagttagcattgaattatcattagcaaaggtagggtgagagtatggaaacttaccacgctcagggcttcggccacgcttcacgtcgcgatctccattcgtaacagatccgttgttcgaggccgggggaggactgaaagtgctgctgtcgttgccatcgccatcgccgtgcaagcgacgggctttccccaagggaatattgttggaaccggtgattccttgatttctccacgacatcttgacgcttgtgctgattctgcagagttgttgatgtttgggataggtttacctggggcgaagttttgtcgcatctcgatcttgtcaggaaactgtccacctaacgctagcccgatcgaggctgagtggcgctacacgtgattgggcggcgtgcgttcagatgggcccacttatgtgaagggatcccgattcacatacggcttctggatgggcaatgaattgatgttgttgaagatatgaaaatgttgactctgtaccaagtctgaaaaagtctatttgtttgatttcatagctcgatattcacttccatcaacaacccttacagccctcatcttacagcctacttcctttccctaacgctcccaccaacttccactccctccctcacttcttagcatcagccttcatccccgcctgcacccaagccttgctcttctccgcctccttctccagctcctcctcactcttattcttcatatcaaaagccgtatgcggactcggcacatgcctccccttctccaccccgggcctctccaacaacctatgcagccacgcctccagcttgggaaactcatccagactcaccccagcccagtgatgagcagccacccacccccaacaagcaaaatccgcaatcgtagcccgatcccccaccaaataatcccccttctcaagctgcctctccatcaccgaatacagccgtctcgtctcattctgataccgatcaatcccgtactggatcttctcgggtgcataccggaagaagtggtttgcctggccttgcataggccctgtcatcaaacaccattagcatcaactcatccatctccttcttctcactgtcatataactcacccagcccccccatctgccaatgcagccaattattcacctcatacccctccttactccccctcgggtacgaaaccttgtgctcggtatcatacctatccaccaaatactgcatgatactcccgctctcaaaaaggttaatcggcgtgccatccgggagggtgtccgtcagggcaggaatccgcccattggggttgatttccaagaaccaaggctcctatcgcttccacatcaacatcacatttaccctaccttatgtgagcggaggggggaacataccttctgctcattcttactaaaagaaatgggcgtcaccttgtaaggcaacccaagttcttcgagaaggatggacaccttgattccgttgggtgtaccaacagtgtaaaggtggatgttgctgttgttcgacgccatcttggatgtaaagttccgtaagaaagttttgggatgagtcttggtcaagtgggaggcgagctgggaaatgcgctgcattgatggggaggggtcagtcattttctttacaacagcagcagttctcttatatatacacggaagtatattgtgggattgtgcaacgcaaggtaggtatgatgagaagggatgatgtgggcactggtgtaacactcactaaagctcagtttagaaatccactgctcctattttacaaatcaagccgcagttaactgaagctcggttcgggagtatgctaccgaggattagtttcaaatgatgtatgtactctccaaaatagaaagagaggggaagaatttgagtgggggttgttgaacaagatgatggggtttattaatcctctcatcaacactttcacgaagatgctacaaataggcgatgccagtccgctagtcaatgatgacgaatcgaccctctcagaagccggatcgacaattgcgccgtctgccgtaccatcgatctcatgaaagaaatggaacaggctggtgggtgactagagaggttgagaggttcgatttgtaatgccccacctacatcgggaacaagtgttgcggggaagacgcttgtcgaatgtcaacgactcgctctccatgaaagggaaaataaaggcgcggtaaacattcagcattccgagaatccgctgttcatagtggcttgttggctgaactgtataaagcttctcgatgctatctcaacgacagcctgcctggttgtgtctcggtaaagttgactgccgaggctgacatgcctatcaatttaatgtccagtgacatcatccacaaaacaattcattgtagacccgagtctgagcaacgctgcaacgctggctttcgagctggtcattatatctcaacgcacgtcgcaacctctgtcagtatcaagcatatatacctcaattgtgttccaggaagcctctactccccatcaaacctacaaccaacaactctgttcacccgccaccaaactctaccttctttttcaacttttctctctccaaccgacccccatcttgccccctcgggccagaaaagaagaaacccccgaatcatgcccataattcgtggggtcttaaaaatagaaatactaaaaaacttgtagccgacgagatctccccagctctgacaactgtatactgtttgtactccagcccgccggccctctttgctgccggcccaatatagtaaagacaatgattcatggtatcattcataacacaacgccccgtcgccgcctgcctgcctgccatatgcccctggcccacccaccaaatccatccaagggctcccatccaaaccagaagcaaaaaggtggtccttctcaacatcatatacacacagaagaaaagaaacatcaaaaaaggaaatgggatcattatgacgctctttaatagtcggttgcccggtccttgacaagcttcttcgtcgacttggccgtaccgatatgggtgttgtgcacctgagccatgttagtgattgtcgtaaaccctttttgagagatgtggtactaaccttggtggcgaaccgcaaactcgtgattgtctccttcagatgggcctctagtgggctgaccataacaaacatgagcgtcttggagttcccgctgagcgagtactgcaagagatgcgtcaacttggagttgcggtatgggacgtggcctgacccgcgtcccagagcctcgataacatcgccgaggcatgccaagctcttgttgatgttctgcgtttccctcatgcgctcgccctcggcttgagaatgcttcaaacgttcagaaccagcaagatccaccaggttgagagtgccttcgcaacgctcgttggtggccgagttctcacccaccagcttcagaatgaagacggaatgcgagcgcgaagatctctcgtttgccttggtagcggcaacgctgcggttgttctgggcttgcttgagcatcatctcgaccttatcgggtaagtcaagcgccactgtcttgcagttgagaactgtagtctgcttgcggctgtcgtcgtggcggatttcgagtctcttctttccatccgactctctgccaggcgtgagcagatcgtggagctcttcgttgtacacttcgacaaaactaccctccatcgtatatgtccatgacttctccttcaacttcgtaatcgtctcgtaaatcatgtgggtggctctgggaatcatgccatcgggcgaggacatggtataggtcttgccggatcctgtttgaccgtagcagaagatgcagacattgtagccgtcaagagcgctctgcacgagctgcgaaatttctccaaagatctcctcgttgtggaccgctggggaaaacacacgatcaaactcgaatgggactacctttcggctcaccatgcccatgctgttcttctcttcttgggtgacgtcgatctgagccgatgtcttctcgtcagggaagccgatttgagctgggttgccttccgaattcccaagcacggggcgtactctgcacatcacacggatgttgccctttagctcttgatacttgttgaacagaacccggcgctccgtctcctccttgattaacttctcgcgagcttcctcagcgacccgcaaagcatcctgcagccgggcctccatatgagcaaacgagtctgattgttgcttgctgtcggattccaggaattcgatcttggcattaaggcctcgtaaccggtcctccaaagtcatatttgtcgtcgacatctcggtcagtttctgctgaaggttacccttgaccgtctgttcccggtccaagtccagcttaaggccttccataagggaccgtaattcctggatctggcggtcttttcggaggacttccagattcatgtcctcctgttttgaccccaacttggcccgtagctcctccagctcctttgagttttgggcctgtcggtccttcatttccgctcggtattgtctctccattgcctccaaagcctgttggtgttcccacttcatctgttcgacctcggccttgaaccctcgcttgatttcttcgacgtcgtgttgatgctctcgtgacttgtcctggagttcgtatttgtgcttttgccgctcgctctcgaactgtaggattaatgactgcttttcttgctgcatggagaggttgtcatgttgcaaagagctgatctgtccctgtagttgtgcagtttggtccatcaaccgttgttgctcacgttcaagatcactcgctagaacagcacgttagtccccaactctggatatcactccgccaaacttacccctattcttcgcaaactgaatagcctcctcgagggcttttctgtcggtaatggtggtatcaaaggcctctttcatctctttgaactgcgtctcgaactcgtgaagccgaccgtctacatcccagcctgtgaaagtttttaaatgtgagtccttggtcaagaatggtaactttttaggagacggagatttggtaggagaacaaggggtctgggcaatgctcctgaccgcggtgcccagcttctccaatgccacacggccattccggatctctggcggggtgactggtacactagggaaattggcctgagagttggtggtcctaaacgggtccggactggtagctcccccccggcggttctggagagtcgaacttcgctgctcttgtccgtcgggcggctgaaacataagagaaagggattgctcttttgccttggatatcacttgatttccgctagctatgttgccgacgtcatcattgagcgagaggttgcccatccgcttgctgagcgtcaactcctctttgctaggcattcgagcacgggttccgacggactgttcagaggctgtagatcgtcctctttgagtccgcactttcttggtacggggttgtaaggaagcagaaaaattcctacttttcttttggtcggctggtcctccatcttcttccgctgatcgcccgctcatcgctgtcgccggtcgagatctcgtggttcctctggtgttcgatgggttgaagcccatggagctgggtgctcggcctgatattggtgggcggcttccggcacccatggttcgcgaaaagctgttggtgctggcatggcgggaggttcctggaagagtggttggtggccgtgtggatgttgcggtagcgggttggtgagtctacgacaagtcagggttagcatcaaggcctgtggcaaggcaagcaagaaaaatacatgatcaagttcagtgccagccgagtcggtccatgggtcgcagtcgtcggaggagcggcgcaggtaggtatctgaacagcagcccctcagacgcttccatgctggcgggttggggctcttcttgttactggtctcttttggggccgacattgagcccaatgacgagtaggaatatggcgtgtgggacagtggggatagattgggcaatgggaagtgggctgcagggtaggagtcggagataacagtcaacgtacagatgcaagagatgcgatagatgtgggtttgaggccgatgcccgtcattctcgagaccgaaggcgtagctgctggcagttgcgatttggagataggctcaccagctctttccgccagtgttttgcgcttggcgtcgcggtctgggactacagaagatccttttcggtcagtcagggcaagtgggtggcatggattgggcggtgacgacaacgtaccggcgccattgtatgtgcgtttcgacgggaggaggcccgacgagtgaggtcgcgcattctggtccgaattggtgatctcctggaggtatgcgctcggggccatcgtggtcgtggtgctcgtgtggactcgaggggcgcgaaggccggagcggaaggtctagatgtcgcaaaatatcagtgtcagggtcgggggtccgagggcagcatcaaagatggagagaaagacttcaaaacatacaccgccgttctctgtagactccatgttggcgttggctccgttgcgcatgcgaggaataagaaaatggacgagcagataggatagcgataggagcagtgctccagtttgagttggggggtgcgacacagtcgtgaacagaggcgggtcttccctgggacttgggactggactggtgcctcttctcctcaacgggtgtagcgtagaaagacggatggtagaagctgtgtttacttcaccggggcaacgaaactgcttacgggagccaatgggaggggtccgctgggacgacgccgtgtggggttttgtggggtacatggtgaacaaaggaaacgtggattgagcagggccagcaatccagagactggcgagagagtggcatgcttggacggataggatgaagaggtagaagatgtcaagcagattctctccccattaatttctcatccgatgcggagtcccagccagcttctcttggaagagctgcatctactagtttccacggggcaaggggggcggtgtgtcaatgtgtgtcccggaataccccgctcaaagggttagggtgcagctttctttcctgtcctcctgtccattcatctgccttgatctgctcatcccgccggaatcattccagccacaccgtccccagtgagccagtgtctccagtgtgcccttgtcccagagttctgtagcgagactggtctctacagcgcacgtgccactcgttcacatgctccactggacaggcatgatgtcttcaaaatatctggccagtgaaagcctctgaaatctattaatcgtacgtcaggcctacatttgcctgtatcacacggatcaacactttacgcaactactactgcggtacatacactcacgacacccccgtcctcgtatacatacggcactaaaataatcccaaggaccgcaaccgcccttgccgcgcatcgcaaccccatcccatcgcatcatggagaagttctcccagtttcgcgacagaggtatgtctctcccccgcctaccatcccatcccctctaaccatgtcacaccctcgctaaccttctccatcacagggtccggcatatcccccttcatgcccacctcctcccccacctccatattcagcaacctaacctccaccatcctcttcctcatccgcctccccatcttcctcgcttacaccctcctctacttcctcttcctccaccacttccccctccccgccgtggcccacaagctcctcctctggacctacctctccatccccggaatctggtgggtagacctccaactcgacggcgtaaaacgcggctccctctcccagcaacccccctcccgcgtcccccaccccggttccctcatcgccgccaatttcacctcccccgtcgacgccctctacctcgccgccgtcttcgaccccatctttgtcgtctcctacccccactcccgaaaagtccaacgcatctcgctcatcgcagcaataatcaatgccttgtcccccgcccccttgtcccctcctccgggaagtagtctcaccgacctgaggacgatcatcgagaagaatcccaacagggttgttgccatctttccggaatcgggcacgacgaatggaaaggggattctgccgttgagcccggccttgttgactgtgccggctgaggcaaagatcttccctgtcagtatgaggtatacgccacctgatattacgacgcccgtgcctggaacttggatccagtttttgtggaagctgctggggcggccgacgcattatattagggtcaggattgcggaggggatggtgaataccaccaaggccgtcaatggggtttcaagccaggaggagagcacgcccagtggggaggacggggtgacggtggaggagcagaagctgctggacaatgtcgcggaggccttggctaggttagggagggcgaagagggtgggcttgacgttgaaggagaaggatgcctttgttgaggcttggaataagaggagaaggtagagctgtggtgaaacaaatggtcaggggttggtttgtgatatgatgtttttaatgcgcatttacaggcaagcaggaaggaatcaagatcggatatagaggttgggaaattttggaacatgcatgatcattagcattataccaggacgagaagatcatgtccgtgtcgataattggaacccaatgtaacaaaaagttcatcaaattcttgcttgattatacttgtcaaccgccaacctggtatatctttttccgcacccaaccacccaaaaacaggcaaacaataagcgcccttttcccatgccaaaataaaaacaagatcagtatatgtacaaaacaaaaagtcccacccttaaattatacctttttctgcatcccttcaaagttcccgagcttctacgcccgttcaagcatcagtcacacagccgtggctggcatccttgaccagctgggcgtacttcctaagagtacccctcctggccttagactcgggggctctccactggctctttctcctctcgagctcctcagcagggatctcgaggttgagcacacgctgctcggcgtcaatgacaatcttgtcaccgtcctggacaagggcaatggggccaccctccatggcctcgggcacgatgtgaccgatcaagaagccgtgagaaccaccggagaagcgcccatcagtgatgagggcaacatccttgccaaggccagcgcccatgatggcagagctcggcttaagcatctcaggcataccaggaccacccttgggaccctcgtagcggatgacaacgacggtcttctcgcccttcttgatctcaccgcgctcgagagcctcaatgaagccatcctcgtagtcgtagaccttggcggtaccctcgaaacggagaccctccttgccagtgatcttgccgacacagccgccgggggcgagggagccgcggagaatctggatgtgaccggtaggcttgatggggtcgctcatggggcggatgatcttctgctcgggagggaagtcggggtaggcctcgacgttctccttcatggtcttgccggtgacggtgacgccagagccatcaatgataccttccctgagaaggaacttgaggagggagggggtaccaccaatcttgcagagatcctccatgacgtacttgccggagggcttgaggtcagcgaggaaggggattctgtcggaaacggtctggaagtcgtcgatggtgagcttgatgccaacggagtcggcgatggcgatgagatggaggacggcgttggtgctgccaccaagaacggtaacgacggtcatggcgttctcaaaggcttggcgggtcatgatgtcgcgggggcggatgtcctctctgaggagggtcttgacagcctcaccgacgctctcgcactcggccttcttgctggggtcctcggcggggttgctggaagagccggggagagtcataccgagagtctcgatggcgctggccatggtgttggcagtgtacatgccaccgcaagcaccaccaccggggcaagcgttgcggatgatgtcgaagcgctgcttctcgtcgatctcgccggaaaggtactggccgtaggcctggaaagcgctgacaatgtcgatgggctcgccaccagcactgcagccgggcttgatggtaccaccatacaccatgatactagggcggttgactctgcccatagcgatcaacacaccgggcatgttcttgtcgcaaccgggcagggaaacgttggcgtcgtaccactggccattcatgacggtctcgatactgtcggcaataatttctctgctctgcaagctgtaacgcataccagtggtacccatgctgataccgtcggagacaccaatagtgttgaagcgcatgggcacgaggccagccttcttgatgctgtctctgacgagaccggagaggtcgagcaagtgcatgttgcaagggttgccatcgtaccagacggacgaaataccgacctgaggcttgttcatgtcggcctcagacataccagtagcgtaaagcatggcctgagaagcaccctgggacttgggctgggtgatggtggccgagaccctgttgagcttctcatcggcatagcggcgggcagtggtagaaagaaggcggctagagaaggataacagtaagcttcttgatctcggcgatagaaaatgcagctctgaagcttgatagaggagacatacgcctggtttctcatgggcagggcccggccagtggccagagctctgggagcaccagctctcagaagtgaggggagcatggctgatatgacgatgactgtgccagagaagagaacaagaagaaagaaccaattgacagcccgtggagggtatagggacttaatagacagtgaggacaagtcaattgacccttctcgttcttctggctgtgtcgggttggggaataaagatggaagttttgggcgaagtcggagctaaaatttccagatggctgcccgagtcgtggtgcgctgtgacagtcacagggacgctgctacaggggtccccacaagagctccccgcccttttttttagctgcatgggaatacgaatacaagctttttcattggtccagcagcaggacagatgccagcagagaagacagtgagatggggtcatctttgtcccaagaatgaaggtcacacttcgagacgggaacccatcattgttcttgagtatttatgtagttggtggcttttctggtttccgctaggctaacgtcttctgcttacaagaaagctgtatcagtacatgtggatagcccgtagcttattttgacctcggtctccagactgctaccgtatgaattgggaggtcaaggtaatggggttccaatacatgctattgtctagcagttcaacacccgggttccagaatccccacatcaagccaagagtgccgggacagccgggggggtatccgccatcggacgggatgccggtgtagggcccgttgcaaggtgctggcggccgtgtattccatgatggatggtcataacaccccttttgcagcggtcataacactctctcctgcaggcatccccgcctgcggcatgcagccatacgcccttcgtacaactagaacgccttaatgcttcccttccttcgcatctgcggacagcatcgttccgtcgttcttgactctccggtgtaggatctcgtcaatgataccaaagtccttggcttcctctgccgtcaagtacttgtctctctccatcatgtcattgattgcctgcatgtcgtacttttcgaagccaaaggacttgttgatgtggctctgtacaatcttgttgatctggtctcgcagcctttgtatttggttcgcatagatgaggatgtccgacgcctgacctcgtgtccctcccagcggttggtggaccataatggagctgtgtgggagcgcatatcttttccctggctcgcctccaatcaggagaatagccgccatagatgcggcgccaccaacgcacacagtcgataccggggacttgatgtaggtcatggtgtcgtaaatagccaacccagagctcacttcgccgccaggtgagttgatgtacatcgtaattggcttgtcggggttgtccgattcgagccagagaagctgcgcaactatcgaggctgaaactgtgtcatcaatggctccgttgaggcagacaatccgttcctgcagcagtttggagaagatatcggcttcgagaagggtcagcatcgccgagtcctagaatgctcatgcaacccaaggcttacatgttcgccagccgccagcctgaatagttagtaagttttccaaaagacaaatggatatcagacagaagcgctcgccaacgtactgttacttctgtgatgtatggcatagggatgccgccactcgtgggagggatgccgcctgggaatgtgctgaacttggaggtgcggcggcaatgcgaggcgcctaaccgcctgagcaggtgaaaagctgttctttgagtattcatgatagcgtatcgatatgtggtaagctggattgggaggtcgcgagaaagtaaacaatccaaatctaattgacggttgcgatgatggtggagagagagggacagctccaagaagctcccccagctccgctgacgttgacggcttggcaaccgacctgccaagacagtcgcacggcacagggtgcgcacggacacatcccgagtgggcaggagaatttggatatcattgctctcacttacacacttgcaagaaaccctcatcggacctccaaagaacaatcacaagatgttgcaaagattcggcagaggtctctccaggccagtagcactggaatcctatacctcatcatgtggatctttacgaacctaccgacaactccacaacactactcgaagagaggcagaagattcaagagacaacgatgagaagtcagcatatgagcgctcagttgaatccttgaacatcgatccagaaaataaaacagtcacaaccgtcgtcggaaacttacccctctccccaattatggatcccgagtttcacaaagcccgaaataatttcaccaaaccaaagccaaagcacgctgcccgcccaaaagacaagttccgcaggcaactggagagaaatccctatggtgtgttgattcccaggcctcactttgcttctcgcagggctctaacaaatttacacagcccgaatgctcgctgagcgcgtcagaacctgtgatatcaccggaacaccccttccaaaacccctcttgcagcgcttcaagctcggccaggatccaaccacagaaacaacatggtggatgccacaagatcttgagagtaaagttccaaaagaaggaggggaggtcccggccgctaccgaacttccgggcccttctgcgtatactctcaacagccatttgtttctacaagaactcgtcacgcccaaaggcatgtattcctcgagttccagcagactactacgtgcaactgagagcgggacggggcgatacacatccgccttgaataatgctcaatggcgtaaagacatggatacctatctgctggaaacaatgcgcaaacgtgtttttgaaggtctcatacatgccgctcatctggctgagaagggtggatcagatggcagaccacgcaaatatgttaccaagctcaacagctggaacgaagtgagcgagttgaagcagcggcaatgtgtcttgtttttcgggcctccagaaggcctttcccctggccccgcgatggcctccgttccgtcagcaatttcgaccctggctatcaaaggctcaaagttcggcgagaagatcgcagtgcatgacatgcgagtggtgctgggcagagaacacttggccaagttaagacaagaatctacattacttcaggacggatcattgtatatgttgaggggacaggcgagcatgagactgaacatgctgatatggaagctgcaagagtatattgctggctcggaagattcagtgggcgaggtggacgatggggagacagtaccacaacgatccgaagattccgcggccgaacttgttcaaccccaagaagaggactgggagtcgttactggatgacgatctggacagggctgaagatctcagagactgagccgaggcatggtaacaggcggagtctcatctttatcacaataaaggagagaaattggctacacctcaccgctagagtcagaaatcttgctataatctcacagggatgaaatggtgggattgaaggggctggtgattacgcagaaacgtgtgggttgtgacgaatgccaaactcgggctcaagacgaaatcccgccatggaggaccattttcagagcagaccgaagcaatgacggcacggacggcactccacgggcaatcgtgatcttccgcctcggtgaaatggcagggttggcaagctggttaatccaatcagaaggcaatgaatcttacagcctcgcgcattgttgcacgggcaaggtcttgaccgcattacctgggtaaaataactgctgcaggccactcctgatatggatgggactttgcaaatcgtcaacgctgttgccatggggcgtgggggtcaaaggtgacagttgactttagaccgcgaagggtcctcctggtggcgcatagtgcacttcttgatgcgtttttcttgttcaacaaactatcactatggactctcgactcggtaacatgctcaaaatgcctccaatatggaattgggaacagcttacagacacaatatggattgcttggtcatggttttggagtggtgctgccgcgctttgttcggacgttctctattccaaagggcctcggaaacacaccccctggctatgccggctcgatatttgggtgaagatcacgatgagtgtcattggactagctctgacctgtacgggtatctgggcagccgtctcctcggtgatagaggccaaaacagcaaacgagttggcgcagtggacttcgaccaaagactttgtcgagttttgcgagtctgtaagtaaggccttttgttttgtaacagcagacccggatggaaaagtgactgataatccaaaagcataacttcaatgcttcgaactgtatgagtgctcgaaacaaaacacttcctcctccacccggcttctcgctgcttagatggcgtcctttgtcagttagtttatggggctccaactcgacgccagaagaaagtcaacactacagccttggcattacctcgattctttgtttcgtcatcggtgcgatttttctggtcatcgtcatcggaaccgctctcagaagaatcagctttgggccaagccaccactcttctaatcttcctcttgctcgctcatccaatgagctcactgaaaacaacgatcggattgtgcaagaagtcggaccccgtcaccggaaatcaactggcagacgtagacgtgaagcacgacaagaccgaatctcccgataccgaacaatcgaaagcaatcacacggtagatgacgacacaagcagtgatgaactatacacgcatggagaggacacgaggcggtcgaggttacggttgcgaaggagggcgaagagggtggtaactgatgagaatgtttagttgattcagaatagcagacatggaaatgttcaaactccagatgggttatttccacaaagcagtttgaatggtggatatgtagttgttacgggttgccatggaaatggttgcgttgaagaaaataatcagaggaaaagctcaacaccagaactgcatcatcatggtcgtggtggcagcttcaaagacggagcaagcacaatattcaaggcagcgggtgtgcagcagcagcaatgctggcagtcaccagcccagtagaagcgtcaagtcagaggatgcaagaataatgctccggggaagaggaccacggtacatatatcatttcccgcatccaaccttgcaagcaacgtcagccaccgggccagaatggggggggtggtcagattggacaaagcgatggagcgggtcgaagtcgtgtttgcggttgcctagaaaaccagggttcaattctacctgtaagctttgttattaggtggttttcgatcgttggtatcgtggggagtttgatgtctagcactcgggggggtgcgatgcctcttacaacctgcatattcgaagtgccggcgagcttttttgtcattttcgaagctgttgatcttttttattattatttaactgcggtgttgagggagatgtcccatcaacaagctcccggaagagtgaagctgtcaacaaaaaagcagagtggttgtgatctgggagcgagtcgaaccagcagctcagggacagggttagggttctttgcgctgacttacacgaccgattgattggcgccagatcttttaatcgggtggatccccttaacgcgtcgagacgcgtctcccgccataattgtccaccactcaactcagcacccttgcgccagccgacctgtccagtcaacaactccacgaaacacatacgctcgtgattcttgagcaatcagttttgaagttgcgctgtacaatcaaccacaatgaaccgtatcgacgccaagaggcgcaatgtcgtcgaccatcgcaagaagcagttcgccgaggcaacttaccagccgcaacaatacccccaccgcctcaacttctacaccacccctccaacagcagatattactctcgagcagtttgaacaatgggctatcgacagactaaggattcttgccgagctcgaggcttgctcgttcaggaacaagacaccggcggaaacagcggcgcacatggaaccactactcaagaaatacctccctcttgataacaatagctcgaaccactcccagctgttcgcccagaggcaaaaagatcactacagccattttattcttcgtcttgcgttctcttcaacggaggacttgcgccgtcggtttactcgtgtcgaatcgatgcttttcagattgcgcttccagggcgatgacatgaaggagcgcaacgcttttgtgcgcacgctgaatcttgattgggaaccagtctcggaggaagagaaaacggaacttgccgccgagctggcagctacagttgggttctccggcaagagagggcaaccgacggtgcaggatgaagagtggtcaaaggtagactgggaaagagtccctgatttgatcgagcacagaaaggtgtttgtcaaaagggggaaagcctatgtcccatcgagggagcagcagagtatggtcatgacggagtttaacgcccgtctggagaagtcgttggaggtaaacaccccttttcccaaccccccctcatatacctaagttaactctccccagctcacagcccgcgccctcccccgcctcgacgaagatgatcgcctcacccctatcctgaaccacctctccaaaaacttcatcgccccggactcagtctacaccaactcctcctcggccatcgaaggcgccgagatctccgcccgcaacatcgacaacctctcccaacacttccccatgtgcatggcccacctccaccgcaccctccgccgcgactccaagctccgtcactttggccgcctgcaatacaccctcttcctcaagggcatcggtctaaacctcgaggaatgtcttgtcttctggcggtcctccttcaacaagatgaccgacgacgagttcaacaagggataccggtacaacgtccgtcacgtctacggtgatgtaggcggtgactccaacaggagaagcgggggctacagtccgtacagttgtcagaagatcctaacggagcatgctcccggtaacggggaggcgcatgggtgtccgtacaggcattttgacgagcagaatttgatgacgctgctggagggggtggggattagtgataagggggtgctgcagggggtgagggaggataagcagaagcagaagtttcatatggcttgtaataggtatgttctggatctgtttatgttgtgtgttggtttgcatcgttggaccttgggggggggaaggtctagaaggtccagatgtcttggctagatggggatggggactgggtcatgttgtgaaacaaggaccctgcatatttgcttgttgtatttcgtacgaggggtggtctagattgctgacattcttttgactactagggtatttgaatacgttcacaagaacgagctcaggagggcaaaggacgagggtatcatgacggctgcgcagttggagacgattgtgcatcctaatgagtacttcaagaggagttacttgttgaagaatctgggcaagatgaaaaaggaaggggacggcgatgtgaagatggagggttgagaggttgtacaaatcacgagtaaggataggataggatagggatgggcgttgtaagaaggaaacacttggtaattttcgacatgatgtatgacttacctagaagtcggcggtgaggtttgaggttatacaacagtcagttcccctctgtcagacgggatacgaacaaatcaggctgtggttgggtctcagtcccttattttctgattgtctcggtcccctattctttctgcctttgtcttgaacacaagacttggaactcatccaatcgagaaggtgacacaccaccgaccatccagatctgatatctttttcgctttcttctggtgaagatggaacgttatcccaaggcgtccgtccattctcatcaagtgaccatcccaaatgtcacctcgtcgggaaattgactaacctacattcacacacacaaagataacgcacccaccccgtcattgagagatctagatctttcagcggtgtattcggccgcggatatagtagtctaggtttggtgctgtcttgtgtaatgtagtgtagcatataaggcatcaaagcctttttaaaccctaacctgccacccctaccccctgttgtggttggtgcctgagaatgatcggcgagacgttctaggcccctctcgcaacaagtctagaagcctaactccgttcccagacagcgtggggtgtactacccgactgtatccgttaccaagatatttgtgtcccgtcaaaggaaatgtcaccacacgtcggcgtgtctgccccgagcctgtagtgtggtctttccgtgaggcggtatgctcgtgtcataaatgcaggttgccgagagtacaaaacaccacctatacaccccttcggcggtaggagaaggcatgcatcattgactgttggggtagtaataacctgaaggatgcaggtagtagcagcatgactgagcctggtacagtacagctgtccatggggcagtgaaagccatgaacaagccccgaagaccgagaagagggtgtgggtgtgggtgtgtgtgtttgccattctcatacactacctacctgtcaccgacccgcacctcacacaaaggaaccattcccgtttcatgcagttagttattcacaacccgggggaaggacttcaataaatgcatcaccaaaaaaaaaaacaccgtagatcccttccgttcctggaacgggaaggatggaaagcctcaaaaactgctgcccgtccagccagcccgttttaaaaccagagaggtgcatcccgaggggccgaagaggtaaggtgcttgggtcttgtctgttctccatgcaatgcaggtccaaaaggtaaataaaagcctgtttttcttttttggcgagcgaaataatattctggtctatttgttcttttgcttcttgatgaactgattgtcagacgacatcctaaactgcccgtgattccccgtgatgctttatctccctcgccttttattcatatttttcgcaaacgtagcgccgagttgtgtcgagtccagaacttcaaataattttttgggagagcaaaaaggttccagaacctcttggctacggatcatcccagggttggggttgattctccccgctgatccaacaagacaggaatattcttgtggtttcgattttacataaacttcatctttccttttcattcacaaaattaatcgcccttggaattaatggtcacgatgcttcccctctctggtatcgagccttgactgggaaaggaaaagtgggcggagaaaatgctccgccctggccttctttcttgtccaccttgtcccctgctgccaacttgccaaaaagcttgttcctctcacttcactcctcccccgcactctcaacggctgtcatcaggcagttgtcacggcagacatccagacaaggcaaaaaaatgatggtattcccagatcggacatcaaagtgtgagatcggtccgaaccggccaaacatgtcacgttctgtttcttttgtttcctttcggtgactgcttggcgaggtgcccgggagcgggaggggggggttttattcaaccatgggagggagaagaaaaagatggcggaattagatccgtgagtctctgtgttcttgataagctccctttccgcgaaattggagtgtgtaatatgtgctgtcacgtgaggttgtgggttaggcttgggctggttctggattggggttagttttgatgccatcatcatcgctatgtcatcggtacactagggaaagagaaaaaagtgacgatgccttcagatataaagaaacagagaccatggctgcgtcatttggctacaggactcccctttcactccgagcggatataccatttcatcaatacttgggcaccaggggtttgtgttgtgttgcagcaaaccccgatatcagcctgacgcgttgtggttccttgtctccgcaaaatcatgtcgagagcggggaggggggcggttgttcaatgtgatcttcacaaggaatcgcaggcgcgagtcaccttattgttctcggagagcctcccggaatcctgcgcctattggaggtgccggctgtgtgtcgtacatctatctacctcacagcaacgtgcgatgcatggttgacaaggtgcgtaagggccggaaaacgcagcatgaggtcatatgcagcgggtgggtcggtcggagtcggtgatatgtcattatcgtcgttggggaacaagagttccaccaggagcaggaccctgtgttgtttcggagtgacgggtatgtgcagtgggaggataatagctcaactgacgcagggttgagataatctccgaaggtgagcagaagaagacccttttctgttggctcctgttgccggagctggtcccgcttgtgttgttggatgggctcttccgtgaatcccgatggacgtcatcgtcgacgagttatggaccaagctgtccctgccaagcgagccgagaatgttgtctcgctctttgctgcaaatgtgggtatcaagtgccgaagatgtttgtcttttagccatctaaagagtcttgacactatcgaggattgtctatcaggcatatgtcactgtcagtcagtgggtgatttggcactgttgatgatatggttgttgatcatctcctcttcatagctccaggcgacatgcattgtaactcgtgtctgcaccgcggagaatttttgtggtttccaatgatagaactggctgtgtgcatacaggaggggctggttgagctgttgaaagctgcaagctgcaacagtttcaaaagcagggaagtaagctcttcctgcagcggcttattccactggatgagacttggggtcttaaacatctgcaagtgtgtgtccaatgaagccgttacaacagaacaactggcacagcaacctctcttctcacttgctcgtctcggtagcccgccccgtgctgcactcggtgcgggacctgccctggttttctgtgctacttaggccgcgggggctatctccatacccgaccacaccacgcattgtacagctagaaccattaacattcacaggaagcagctctcaggaatagcagcgagttgagtatctttgttgtgtatattcatgatctcgatctcgtaaagaaaccctgaatattctctgtgggtatctcttaaatcctaggataattatccacccatgcgtgtaacattcccttcccttttgattgaccaaataaccctcccatgatgccatgattccagaattcccatatcccgatttcccatccgtttccacccaagaagaaacccaaacgccgcgctcgatgatgatgatgatgataagctcggtgaataatccagaaaaaatgaagtagtatgaaaaagggtaaaaagccctcaatagattgcatgaaagcgggtgtcggttgcatctgccccctcctgatgacgacttcagccggcgcgaaggctggagcacatctacgtcagagcttcgcttggcgatagacaggggtgcgttttgcagcctgaccattggtggaaaagccgttttctgaatgacacgcaagcgactggccaatcacgtcgtgacctcccgctgcagcttgctgcacaatgatgaacaccttgcaacacagctgtcgctttgtgttgatttggagaattgacaagagttgcgcgcccatggggctgtcctgaacctggcagcaaaggacgggttatgtcgatctggatctcagggtcttgctggtcgagaccctgaaaaacaaacatggaaatgtgcgagcaagatcgataatgtgccgtgtagctgttggttggcgaattattagacgagctcttcgtggcctgcaacgaagggcatcgatttggccaggactgcccgtatatggtggtttgtgcaggccatgattggtgagaattggcggctgagagcaaggctgtcgcttcgatatatgagcgttgctggtgtaaacccgagccgaagaggaaccaccagcccggcattgccggtgcgctgacagaactcttgagatgtgatcaaaaactctcacatctcagcttctgcctgcgtctggcggaagatgtcggcgttgacgagcaaagcgagtccgtgaggttttttttggcatgtcgcttctagaggtttgtagttcacgtgtagccaaccatcttggcgcatctgttgcaatagtagatgttggtaccgatttggaccattccagagctgttggggtcgtcggtgctggtcaactcttcggcacgcgcacatcgcaagcagcggatgacggagacctgtacggggcgctgtgtggaatccatgctgtgtcgtactgaggatcgtgagctggagctggagaggtctgaatccgaagcggagtaggatgatgaagaggagccagagagggagctgtatggtgcctttggacggtgagacgacatagtgtctgagtcgttcgtagtagcggcgattaaatggctgttgtttgtcgagaccagagaggagctagaccagagaggagctcgaccatcggataagaaactgacttgggttgaggccagcgttgaatgtttatttttggtatccttggggtgaggaggagagttggtgaggggagtgtgtgtgcctttatgatgttggagagtgagagcgagatgtgggtaaaagggatggactgggccagaccaagactttattcgtctggctgggtccaaccaacaggagcctggacttggggtgtgggagaaaagctcaagcttgccagggacgggagcagggggagggggtgtgcgtttctggctacgctacagcgacaccgggtagcccgctgtaagtcacacagaacgccctgctcttggctcttggcttaaacttacgccccgttacatgaatggtttcttgatcagcgggtttgtcctaccaaaaagtcctactttcgtggacacacgtatgacccatatgctgcagcagacaaatgaacagtgaatcaatggcccgaggctgaagctgggcatgctcaagtttcgtccgtccgtctcttatctctcggtgcaagcagcggcgccgtttgaaggtttgacggtctgcatcaaccaaacgttatggaagtgttgctgccggagtctttatttccgctcgccacaaagagccatccgcaggtgtcagagcaggatgtccggtgttgtccagtcgaaggattgcgtgctctgctctggtctggactcgggttcgtgcatattacctgccaatccagaccatgatctctctttcaaagcccgatcgcactgcccagacacgcggcttgcccttgaacgcagcggcaggatccacgctggaaggtcgcctgccactggcagcgcagtgttagaaaaacaacctctcacgtgctgtgcctgaggtcgctccggttacctaatccccagcagccaagtggaaaattaccaaattcacgacacattgtgagggttggggctgttgaaacctctgtgccaagagaaaatccagttaaaagaatgaagcttcatgcgtggtgcggccctcacccggtgttcggctctgcttagaacaatggcgaacctccgaaaatattctaccctctttttctcggccaggtttgatgccgacttgtccgaggtcgccgtttgtactgtgtattgtaccgtcaattaaacatcaggaacctgaaacattcaccattttctcttatctccactcatctccagctctcacggacgtcttctttgatactgctcccgtcgtcctgttggcagaaaagctcctgaccactgatggtggccattcgcagcaacacacgcaagcagtatctgctacacctaatacatcggaatgagaatgcatctgaggatgactcccttcctcaaacaacagttcaaacagaggcaatttaggaccccgatacaagaaagcattgtctcttcacaaatgtttgtgcgttttccgttttctgccaccaaaaaggcttgcgtcttgagcggggtcgctgcccctggccaaccttaatccccgccagatgcggaccgtttcaagattcagacccactcgaaagaagctggttgggctgaaagccagcttgcccaccacgaattcgcaaattcaaggcagagcatcattattacagcatttccacgatttccctatcgacttctttggaaatgccatatttcgccgatgcctgctcactcgcagctcttgttttggctacacaatttgcccttgaaactgctccatcaaaatcgggttcaacccctccagctcgcggtcaattcccgccctgtttctaccctgttacggtatccttacgggcccgcccttccaggttgtcaatgttctggaatcctgcggcccttccgtctggcggagactgagagagcttgggttgtgcgttcgagaccgatcgatctatccaaaacagaatcacgcacacagtcacacaaacttcctttctcactctcctgattctcgaatccacccgagttttctccaactgtgaactaacaccctacttcagcttggcagggccctactgggtaggcttgcgacgttggagggcgtgaaggcaggttgacaccctgcccacaaattaatcgacacagtaaaagtgagttaacatatattattttataggccatacttcaaaaagcaaattaataggtcttcaaacatctttaaaggcctattaactatctttaaaagcgtaatgaccatctttcaaggcataatttatgatatgatatgggagcctacttgtgtgtgtcaactattcggtggtgatggtgactctgataatgccccacgataagatggggagcggggtatcaggaaggtagcctccgcaaccatgcaagccatcaatgtgatcgcttttgtccaatgcccatacttcaccatcaaaatgccatgcccgatggctgaccatggcctccgatcgcccctcctcgccgtggtgacatgctcggctgatatagcttgcaggtgtggcgcgtgtttggtgtccatcaatcaatcaatcaggggcgaggacctcgccgtgctggcgtgtcatcgagatcgataacaggagagatctcgatgaggaggatctccaagactgcttacctacataaataacaaaaagcttaaaacaccgtccgtccgctgcatctcgatgcctttgcccctctctgacttttggctttccaccgggctggctgatccgacccagtgcttctcgacactcgacacacacaccaatgtctgcttctctgcctgccaccacagtgtccataccaccccaactggcagccaacatcgaatcatggggtgtgacgcacgcgcggtttgtatctgatggagtgtctacctacataaaacccacctacggccatcgaggaatgaaccgacatcgaactttcaaactatatcccgtaaccaatcccaacacagttggttccacctgccgccttaaatttacaaacatagtcgatgaccgacccaatatcgatccgaccaggcgtacaacaaatcttatggttcgtctcgccacctgcaaatcgtgtcaatctcccggctcacttatatttacaacaggcaaagatcctcaagttctcccaacactcgcatcgtagaatctccccctgatctgaactatccttgtaagcacaagtgggcgtggcattagcgaccaaccgaccggccacaagccatctctcagtcggtagattagatcaccgagtatttggtaagaagacctctcgctctcgcgccatcagacaaagacaaaaggctcttttttagtttcgccggcagagagaattagcaaagtttcttaccaatccaagttgaagcagcaacgggacgggtttaaacaaacccggcctataaccggtttttttttgggttttttttgtttttttgcaatgcgcacggagtccatgtacgtaagaatgtggagaggggagtttaaagaaacttaaacttgaagacaccactcgacaaagaacggatggtgccagaatgtcgggttcggattttggctttcagaaaagttctccaccaagttccccgtggacgggagtgtgtctgatttgtcaaccgttccgttgggacttttcagggccgggacttgacagggacaacaacagggcgggatggatatcagacggaactgattaatatttctttgattatgcgtgatgggatagggtttttagttcaagccacggttgcaaaggtaacgtgcgactggatgctttcggaagagaggtgggatctggcccgggctgttgggtcaggaacgaaagagggatgtggatatctgggggaagaaaaaaggattttggcatccttgggtcgagagggacatgagggtgatgatggtcttgagggaggatgaactggttcattgttccacgtggaggagtgatggacccgagtagtcggaccactttgtgggttggggggttgatctagattctagaacccatgttgtcagtaaagagcagcgagcttgggtagactgaactcatattgactggtagacacatagactggcttaactccgtgcccatccaccgttatcccacgtggagagtgaagcttcggattctttatacccttatgacctcaaccagctcaccacccccctagttacatatggcttggctagaatgatccagaaacgtggtcaggacttcaactggtagagtgtagctttcgtaagcttcgcttcgtcaatggcatcccacatggagggagtgaaaggcacagatctaacatctgatgtagtaacatctggtccacctgttcaccgtttttagtcagagtctgcttggcacaacccccaagacttcacaactgctacacaagtagtcagtagatatatgtggaattgtagattgttccacgtggaacagattaatcccacacatcacctcatgagctgtcataacgagcttggctaatctactgactcataaactactaacacaccagtaagcaacagctgggtctggggctctttacgacattgttccaagccttcaagtgaatgcctcaacaccagggctgaagctcgcgcccttctcggtgacgagacaagcccggaaaacccgaatagcacgtaacaagggatcctgggtatcgcagttgccaagcctgccttgtgttgtgactgcttagtaaaacttctttggaaaaggagtaggtgagagagtaccaccctcgcttgggtcttctaagcttcaagtgtgatgatatagcgcgttgtagacgtagaaaaaaggttgtgccactggtgaatcttccctgctcattgatcattgcagtcacgatggatcgaagtctgaagacgacacgcagtggaacgcgtgccgtctttgtcacaacagcttctttgcctgatcatcatgaattcacttgaatactgagaggaaagctccaggcctttggtctttaaacaaggaaataccaataagtcgcggtgtgatttacgttgacattttcacaagtagaaacgcatcaacagatttagagttggagcgtgaattattggttcccttccctatttattcctgattaaaaagtgtttctatgattttgagagcgagagagagtgagagagagagcaagcagccggcacctggccacggcattgtgtctgtgtcaagagactgtgtgtgagagagatatcttgtgagcggaaatctgtttgacccgagaagaaaacttgatctcctcctttctcttgagcttgattcttttcatgtcattaattcctactcccctagcaaccaggttttctctcaaaatatttgaaacaaaaacatggccatgagagagaaaagagcaacgaagaaagaaccaacagtcagagtgtgtgtagtatctctgcaaagacagtatttcctccccccacccccttccctgccttccccacaacatttcgccttgtgtgtgataataaaaaagagattcggtcggatgattgtgagtatgcgagagttgtctgcgtgtgtgtggcggtgcttcgttgtcgatgtgtgtgcgaaaaatgaagagctgtgaaagacaaaagaaaacagacgagagaggccaacaacaacaaaaaataataacaagcagcggtgaacggtaacacctgatagataaatacaactgctgaatgcgcctgaagcaaaacaaaaatcgtctcgtcattagtcggccctggcttctcgcggaacaagtgtgtcgaatagaggatggtgataatgcctgatggtggtggtagggactggaagaagtgataccaaaaggtgcagccacagagacggtctgtagagtgagccatatggtggattgtttgagactgccatgactgctacatgacaatgcaacagccgcaaccacccttctttggtgctggatcctcctcagggggttccggtaccttgactgtcgacgacggctgaagctgggtctgtggttgtggtcctggcgtccgtgggcttggtagaggactcatggttggtttgtctgagatcttgggcattgttgaatatgagctcgctcttcctccaagcgtagggctcctcacttctggccttaacggccagtcaccctgctcctcatcctgcgcttccttttcaggatccctttcctcttgtcccgcgatgttctctggaggtttcaagaacccttcgtcggtgagtggcctaaactctctgtcgtagacatttccaaacttgccctctcgttccatcctctcttgagctagccgcttggctacggttggcaagagttgttggtccggaggcaagcgaggatcaggccggtacgcagagatcatccagggtggttctccttccattggcttgctactgctggaaaactccctctcagcagacctcgtggatggccgtgtcccgctactagtcgagtccttactaggcccacctcttgtcttgggacgtccggcagccccattcgcagcctttggttttctaatcccggcaggcttcttgggagatggatcggttctcttgttcggttggctagtggattgagcagtcccctcgctcggtgtcagtttgccaagcgaggttgcgttactaccgcttctgcctcgggttctggagtaagatatcgagtcctcgccgggactaccgtcacgtttcctggccaagagagtgtctcgttcgatatgctcgctgggaatgggcaccgggctgacctttgccacggggattttcgaagtgtttttgccgctacccgtcgacacccaatatccgtcaccctcttccacaatttcctctggacgtctaagatcccaactaggaatcgcgttgagatctggagtcttgggttctgtcgtcgttgcccccgagtttttcctagatctcgaggcattatccgtaccaccaatcgacctccccgaaccgttcagcttgtcctgactctgatccctccgtgtcctgttttgactcttcgaccttgccctgtccctttggcgtggcaaaaagataccagcagcttgcaactcttcactttcaatccgagccaacttgtcccgatgaatccatttcgaattgtcctcttgtcctatcggcggcgtgctgtccctcggccccgttctctgcaaaccatcggatccattccctctcgtgtcgctatcaaatgcttccgtgctctccagagagctggggtggtcctgaatactccggggtttcgattgcttgtggtggttttgggtggcataagcagtcatatcggaaccagcgtctccgttggcgtactttcgcgaaatcgagtctaggcccgtggcggtagagtgcagagtagaattaccattctgaggggccagtggctgtcggtgggatgagtaggcgttttcgtcatgtacaagccgcttgccgtcgtgaaggtcgttctgtagcgggacgcgagtgttagaaaagagcgctttccctcaaggtaagggaggcaggggacagggaagttgggaggaaggcacgtggaaggcacgtctccgcttgaaaatgctgtcgatggttttgttcttacctctgcttcgtccggcacagcaaggtcccacgaatagccagtgtcatgggccgcagaaggtgagaatgccgtcgtcgtctgcgacactgccgccatatttgtcaccgacaaagacaactcaactgacggttggcgacggcgacaaaccagtcgtcgactgttcggcaggaaattacggggcaggtgcggcagcgaacccaaaccaccgggccaaaaactgggcctatctttttttgatccggaaacagaaagaaaagtgtagattgtgtaggccgttgaagagagcacttgacagctgccggcgcgggtgtaatgggcgccgagtgtatcaccgcgccacccagcctctccaacttggccaacagcgtcaagtgcagcgcagatcggaactcctcatgcggctgtttccgatgttctagatgctgtcgtcgcggatcgggttgatcgattcaatcggcgcggtcggcggtaatattcgcgcgtgatggtcgtgacaaaggaaaagggcggaagcgcaggcagacgatgcggaggtcgtgtggttgcttggaagatggccttggtgttgtgtgatttgtcgtgggtgtcctgggctgccttccacggagcaccactcacttcaacctttgacgaaacgagctaccgggacctaaacttttttgaggagcctggcgtctgcgggtctcggaatttggattctccccccttggccctgttcctattcaacgtcggcgtggctacctttgacagatcaacggggtcagtgttcgatagttgtcgtcgtctgattaaagcagcggagcgagcaatgtgcccgagtggaaacaagagaatggacggatgcgatgcgctccaaagacaaaaaaagaggggcatggaaccaatccacaagcagccttgggcccagcggcatcaacaaactgacgggttgacgttgacgtgaactgtcaaacgaacattaacaacatggaccgtccgtcgcgtggtgcaagtatcaattgacaatttcctctaggcactgccattcccttgggccatccaggggtaaactcgtcccaaagtcgcatttgctggagaagggtcccaagcgaaaaggagtctcattaatcttctttcgtgatgccattggtcaattccacccatggtccgtgccgattgcctctttcactcattcatttctcgtcttggggctcgacttggacggtaatgtccgccaagtcaagcatcgccgttcctttttgccttgttctcgacagcttcaacatcatgtgattgattgtctttcatgccattttcagaatcatcgaatttgccattcttgctggttaaacggtacatgggagcgttgaaaagctcttgccttgcctatcaatccaaactttattcgcaagcgagattcaacttcattgattgctctctctttctgtcacttgaccccggcttccaggttcatacaagcagcctcgccctgcttggccacatccgcacagagcaaacaatatcatggcatcgtctcagtctttgcccagccaaactaggcgtactcgaattgtttgtatcagcgatactcataattcaactgtcaagctaccgaaaggtgacgtgctgattcatgctggcgacttgacgaaccagggtagctattcagaggtagcgagaccgttccttttgttgaatcttcaagggcaccatttatggtttgctaacggtgccttctagctttccaaaacagtgcagtggttagaaaaggtcgactttgaagtcaagattgtgattgccggtgagaattgacagccacgacgactgcatttctcttgcatcaaggctgattctgtcaggaaaccatgatataacactggatcaaggcttctatcaagatcatgggcaaagcttccacaacaagaaaccccagaacacggctgagtgtctcaagcttctgacatcgagccctaccatcacatacctgtgtcatagctccacgagaatccggcttaccaaccccaaaggaccaagaaccgaattcaatgtctttggctctccctacagtcccaagaacggtctgtgggcattcggatacgatggcaacggcgtggagccagatccttcgggaacgcaaacatctacagacctcgtctcccaagaagcagtaaacctttggtcagagatcccacttgataccgatatcctggtcacacatacaccaccacgaggcaactgcgatgccacgcttggatgtcaatttttgaagaaacgactctcgacagtccgcccaagacttcatgtttgtggccatgtccatccgggaaggggtgctcagcgagtgcgatgggagccggaaagggatgaatttgccaacgagcaatatcatgaagccggcgtggaatactgggatgacccccacccagatattcagtcagccaagctcagtctggttgatttgacccctcgtggaggcaaccgcgcccttgcctttggcaactcggccgaaactaccacgaatgtatcaggaggcagcccgcgtgatggtctgctccgagcaccgtctgtctcatgcaccccatcatcccgacaggatcccgagtgtcgggtctcggatggtcagccccgtggccttggtcctggtcctgggctgggccccgggctccccaccttggatgacgtccagcctctaacgtccaaaagccgagagttgaactccagtcgcacgggtcgacgcgagacttgcgtagtcaactgtgctatcgtggcaacgaactggcctcacacgggtggcaggagatacaacaagccaattgtcgttgatgcggatctgcctgtatggacgtagttccaggactcggcatactgccagcctacggcgaatagagcggattccattccttgagagatccctctccgtgactatttgggtagctacgtgtggtctcatcgacagacagctggcttgggacccgttgaaacgccgactacggccaccatgatggagcatcaccgaagatcaatacagactcgatccgacacttgttgctccacccaacaagctgctcggcccgctctatgaaccaacaaccgcatggttatgaatccgatacgctaccgtcttgcccgtccaggatcctgccgttgctccccacagaaccaagtgtgctcaacgtggcatgcttgggacaacatctccatagtccagcccatatgtggactttggaagcatggaggaagatgtcaacctcgacatcatgacgaagctacgatagttgtcactgaacgactgggacacattcacagctgaaaccacgtcgacgagcgtacgtgcatatatccaaataggcaacgtctcatgtgacgttttggtatgttttttaccaactgtgacgttttgcaagctgttgaccgagcgaggcagggctcggtcagactcatctccttctactccgtacaaggaatgaatggagtagttctcaagtggagtcttgttcgttgctcttcgacccggctatgttccgatatctgagaggccagacataggcaagcctcagcaggcgaactggcttgctaagatcaacgtctccttgagcgtggcacatgcctcgaacccggggatccgcagcctgaccccagaattcacaagcgggctgaacatcagacatctccgtcagcaacggcccgcatagcgtttccgcttttaccccagcttgcagccgtcactgcctcgtgagatccaggcttgaggttgtcggcaggtcacgagctcagaggctcacgagtgcaggtacaagagccactaagcgctggccaaggccagctgcggtctcggctacgtgctctctcttctttgccaattgcggagaaacatactgcagagggagaagcaacggcggtgctaatcggaaagaaagcgagagccgcaggagtctggaggggcacaagaccgcgagctgtcccatgtggcacttagacgagcgcttctgcatctttttgggaccagtcatccagtgctcgccatgacaacagtggtcagatggtggggatgaggccgcggagagcattaacgtctgatgctccagctcctgcacgatagttgcgttatttgtcgtgggggaccattgcagtccaatggggctttccaagaacgctatggtgcacatgtgcctcgggaaccagaccaagacgcattgtgcacgaggataccagaaatgctgagctgggaggctgctgacagatgtgcagtgcacagcctgcccatcaacatcacaattggcagcaaatatcgaactcatggttggttctcaccgccatgaggtcaacggacgcacggcatatcgacgctccattagcagtcagtctgaccgttccgtgcttcccgtaccggactatgctctcaccattggggtgacacaaagtctttcggtaagggatctcacccgcgtcgaggtttattcggtgtcagctccctgaagttaaggtccttacctaacaagggtgttttgcttggtcaaaagagcgggcatgggtatggggaggagggaggggtaaagtcgcgcgggcttggcggggtaagttcacacttccccatgctgactcgtcacaggagctgtcggtctcctgagcgctgcagaagctccaacaagtctcaaaagcgaccaccggaagagacagtttctctctttggggaaccagatctacctcgtatgtacctctccgggacactgggcaggccgaaacacagcagatgacattgttgggagggatatcagtgcttagagtgttacacctatgaccgcattgctgtgcaaaaaaaaaagcaggatctgggcgaatcttgatatgttcatccacacatgacagctcaggacggaatcctgtcaagcctcatagctcaggcatcaaaacctctctccaagccgcagtgtccgatcgactggcgctccccccgcgaccaccgaaacggcccactgggaatgccgctgccatctgcagattccggattttcaggggtcatgattggtagccaaggcgcctcccactggggtctcgttgtgttttgatagcacaccacacacatctcgattggccgaagcgtgggtaggtgtcagtttggcgacaaccatccagtgaggggcactggctctggatcggatggtcagaagcggccctccaactcgcgtcatcagcatctgcttggccctttccttggccggcctgccccgagtggtgtcttcgactgcgaactcccgatggcgagagggtgggtggtatgggtgaggtccaagtcgtgagtggtgtatgtatggaggtgagcagaacctcgcggtgtgagggaggcacgagagggagatatgtatgcacacactcaccgcctatcgggtcctttgaggccagcgccccgtacctgctttcatgatggcctctttggaagaccggccatggttggctgtcaacaacaggaggtacggatgtatatcggtacactacagattcaaccccccgcgcccagcaagaaacgagcacgagatgagcggagaatggttgatgaagcgtctcagcagacttgactactaacgtcgatttttgcttgataaaaccgcagcgatcacacgtaccggcgggaccttgcctttgcgcggcaggtttgctgtccaatcctaacaaggcacatctaccagcacggctaatagatacgggtttgcgcgactggcgccgaattccccaagtcctttttgatctcctctctggctgtaacgagggacaaaaatttttgaccggaaccaattggctgaagacctgcttagtagcaccgcttagcttctggttcgtcaatccaagcaacacgaaaggaggggagggggttccctatcactgcttcatgccggttgtcttgcctcacacacggtggggggtcgcctgctgagtgagtggtaacgggctgggaaccggcaggttcgggcattcagtttttgtgacggctcgtcttttcgcattttcactgcagggcattctccatggaagaggagcaattggttggtgagagaggagcccacagacctgcagccaagttgcctcgcatccagtcaagccaagaaggcacgatgcgctggcgcactaggtacttacttactcactaccactgactggcctaactctgatggcttctccgaagcacacaagatgcagtttttttctgatatcgatgggttcttttggggacttttctgctttctgagagcaggggaaagaaagatgtgacaagtcaaccgacagccccgtttcgtgtcgacgaggaaggttgatagcggcagttgaaagttatgggagagtgggagatcacctatcaagaacaccgcgatatctgggttttagacccaaagttgaagtcaggctctcacgggcctcttttagacaacaaaggacatgccataggataaggcggcggggtgggcttggttttggtttcaatgaagctatggatgcgccatacagctaccatgtcatttgccccgcagacgtggagttttgagctgtaagccaacaagaaaccacacgctggctgctgaagaattatttttcttctggctagctctgctcgtgatcactgggttgggtgttgttcgatgggcatctgattttaggagaatgcgatctagctttgggttcttctgtatgcgtcactggacagacaggaaaaggaggtggatatgtggtggcatggctggtgatggtggtgctggcaggttaacgaacccaaaccccccaagaccaagcagctcagcccagcccagcccacagggacaggacaagatatcaaatattgcttgcgtagttgcttgctctgctgctttgcttgcttgcttatgtatgtatctgttatgttatgcggtcgaggctgattcgtcgtttgcttttctgctgtcgttcatcgcctcgctttttacttggttggggtgcattggatgagagaactgagggctaaggaccgggtacatttctcgggatttgaagggaagggagagatgagtcttgtgcaaaccaagagaaggaaaaatacaaaaaaaaaatctggaaaggaccctctctctctgttgcatcgagttttattgagggaataaaaagataaaacaaacctggtggttgccggggaggatgccgaccgagaagactcaccgctagaactactgttatgtaggatatgcttgggatgtgggagttgtatgcaagatgcaagagggctgcataaaagttgaaacgagcgcgctgccgaccgctggtttggggatgttgctttgggggaaaatctcctctgacaaagatttaaacggagattttgatgggttgaaatgcatcacttggtggaagagttgatctggaatagctccataagaggcgacggtaaacgggatgaacatcatgacaaagcgtcgtgagcgtgctgtaccatgagttgggaaggcatcggtgttaaggttatcgcctccaacgtggaaatcccgtctgtcatctgaaaatctgtctttgtcatttgctcaggcactcaggcacacacacgggaatctttcaggcaccgggtctgggtctggtctggtcgggcctcggaaagtttgccacttttcaggagaaatataacttctcggccacttgttgagaaggggcttgggcttcgagggaaatgggaatcaatgtgtcatttggatcccgaacagtatgattcattcataggaatttgcaaagaggcaaagaagttcccatagtgtagtgaaagggggcaaaattctggaagtgttggacaaaaatgcgtatgcctttgcctcagtgcctcagcggtgatagcgaaagggaagttgaggaggccgctccgggcggttgttagtagcccgttttccggcagacccgttgcccgttcgtgcccgttggttgggcgggtttggtggtggcggagaggctggattgttgttcgagggtcgggcgataggtacctgggtagggattcctccgaggaacttcttgagcgccttcggagagacctagatgaggtcaagtgttcgtcgcctcgcgttctcggtgctgtgctgcttagtcttacacgaaaggagctgaggattgtgctgatctgaggaggcttggaccttgggcttgggggaatattatgtatgacagttccagattgaggccgtggtgaacgctgtgttgtctttgagagagggccgagtcccaactgagacaggtgcattcgctagcggcgagtgaaaagatgaggaggtgacagaagccgacagaaagaaagggacgtccggtgaggtgcggattagttcaaagcagtttaaagagacgggtgttgtcagcgggcgctagctgaaagaggaaagattgtgcctgtcaaaccaatagccttccatccccacagtatccacaacctcccgcatcgcccacgcccccccgccctctcagaccgactgaggaatccacagcgggggaacaagagagaggaagagggcgagtgagggcagctggctgcgagaactctttacacatctccatcttgcccaccccatcctcccaattgattcatctttgcttgccagttcagtagcattggtgcagtgcagttgaacctgggaagaaacaggagcagaagcaggacagcgcgtgaagcaggaagccagcaggaagcaggaagcgagagcaggccccccgctggccacatcccactggagagaacggcttgcaggtgacttcatcgcctgtccttcttcgctcccccatcacctcataccacataccacgcaccacctcacaacaacaagcaacccgagcccagaaccaggtcggcacttgggctggccctgataatcacgaccctgttctctggaccgttttccactgtttttgccatcgacacctacccacgcataccgaggaacttgggacaacaaatccacttccagtccatttcaccccacgacagagcagcaacggttgcttggtgctgggtagttcaggtgctccaccagccaaagcactcgtcccatatacagcaacccccgtcccaacaccgcttcctctctccccctccccgctcgctgctgcacctctacacctcctcctcacacacaaccaccacctcaacctcacaacccccccccccccccccccaaaaaaaaaacaccgcattgtctccttttttcccttggttttgtttttgcctggttgagccgctggccgacctgccttacctcgccctacccatcaatcaatccgcctcggaagcgtgattccattcctcgtcgccgcgttcgcctccctgcataactcaccacccacgctccttcgacccggagccgagtcctgacgcctccgatgcaatagccgccccgtgtcgaccagccgactgctgcctctgcaccgcgctcctttcgtcgacccccatcgtcatcatccgaacactcacccatctcaccaagtgaagctccccagcagctgcttctccttgacggaaacaagcggctctctcaaccatacccgtcgcagttcatcatgagcaccctccccgcggatccatggaagactctcggtgtcgagaagactgcagacaagtctgagattcgatctgcttacaagaagcttgtgctcaagtgccaccctgacaaggtccaagaccccgagcttaaggctctgaagcaggaggaattcacaaaggtacaacaagcctgggagctgctcagcaatgatgtcgagcttgccaagtatgaggagcagctcaagctcgctgagctcaaggcaaaggcccaggccgccatgaagaacgctgcgaatacgtctgttccccgcacaacatccaccaggtactacgacattcgcactgccgaaccaccatcaaagtacaagagccacagtacttcgtctccctcgaccgggaaggtgtacacccattatgcgtcaccccacacccggtcgcacgaggaggttcctgcatctcgtacttacgccatctatgaggacggcgagaagactgcccgtcgcactgccagctatgagaagccatcaaagcgtgatgacgagaagctggaagacatcaagaggagagagaaggaagagctccgtcgattcaaggagaaggaggaggagaggaaaaaggagaggttgatcgccaaggaacgtgagaaggagctggagcgtcaggaaaaggaaagagaaagggagcgtgagaaggagagggaggcccgtagggctgagaagaagagaattgagcgtcttgagaaggagcgggagaaggagcgtcgccgtgatgccgaggagaagactcgccgacacaagccttacgtagaaacgtaccccgagtttgccgagcaaccttgggcggaagacgagatctatatgacgtctcggtcggataagaagaagtcttcatcgagcagcaagaagtacgatgacccgattcttcgcgagcgggaacgggagagggaacgtgagcgtgatcgtgagcgcgaacgtgagcgggacaagtcaagctcacgccgggccaagtctcctcatgctgcggcgatggaggtccccgagaggaaacacatcgaccactttgcagaggctgccagctacattgcccgtgccggtggttctgctcccaaggagaccgctttctggaagtcgcaaacgcctcctgatcatattctcgaaattcctgtcgcgcccacaccacctcccgcagacccagaagaggagtcgatcatgcgggccgccaggcgtgcagctcgccgtccttcacatgaggcttccaaatccaaggagaagctgaagtacgatcttgatgcttctcctgccaagtctcgtccgattcctaatcttaccaagtcgtacaccactcctcctgtttctgccgagtcccctcctcgcgtcagccggaccaacacgacgccacatgattacgagcgcagcgcagcacgcggagagcggattgttcctattccttctcttatgcgcagcacgacttgggctccaggtgctgctgctgcccgatcagacccgtatgacgattattacgaatcagacgaagatcgagagcgcagacatcgccgccgccgtaacagatctcccgaagccatccactacaaggttgagggcggcaagacctcgaagatgggttacgggtacggcgagtctcccacgtctcggaggtacgcagacgatggatggagtcctcattctccttcggccgcgtatgcccagacggctttcaaggtcaaagagggcaagtcgtatggcttgaatgacatcaagtacgcggaatacacctacacacaagctgacccgtacggtgctgctgtggcatcatgaaagtaatgccgcggaccggtcgtcgctttattgccatcgccgggcagggagtcgagctggcatcaaatgccaccatcgaaccattcgacagctggctgagactgcctcgactacctctctgcgcctctccctgatgtactctcggcaaaccatttctaattcttaatgagcgacgggacctaacatttttgctcttatgcgagcattgagcatttgcaaaggtagttttttctttccttttttggggcaggagttttgggcataggatttcaacctgggctatggatgtggactcggatctattttcctctgatggttttcatatctactctttttggatatcttttgacatggacgaaatatttcatgaaggaaaagaaaaagaagcagtaacgaagccagctcatgtgtttttctctatttctttcacatttttcctctattccatcaagttatgaatagattggttatgggatgatgaggaaatggaattcatgcgaggagagagaatgatggagaccgccattgggaggaatgggaagggaattttggatatggcattgcatgaggcgaaagggtcagtcagtcagtcaagttgaagtctggggtcacgtcaacacctcgcgtcgctagggtcttgaaaacaggctctagctgacactgatgaaccgccgcatgacttactggctgggctggctgcctacccaccgaggcatgaatggagttgggatatgatgacgagacgaagcattgacgagcgagcaaagcggttgggtgtgggttgggctttttttttctttttccttttttttgatgacattttttttcttttcttcatcatcatgtatctatgacataccaaacgctgcgagcctttttgtttctgacaacaaaaacgcaacgcaaatacgcacgcacacacacacacacacacaaacaaatcaacaacagtgctgtcacgcatcatcatcaaattcgcattcgcagttaccgtcaattctgggcaacgttttacgaatctacaagaacggcatgtgtgtgaattggttggatgacgggatgggggctctgttgggagtaggggagcatggggggtggctgaggtatttggggaaggagcttgggttggattaggttgatggggttaaaggtgttggtggtagtgggagcttgccggctgggcgagtgtggctatggcgggtgggttggtggtggtgacacgcaacctcttcttttggaggagagggtttttatatggtatttggtcaactaccaagacttgcacttgggaattgaccatgtctcgttgaggaaacgggatgctgggaggaaagaatctttttgggacccttttttcttctttttcattttattcatgactcttatgacaatttgcaagcagcaagctagtttgatgaaataacaagaacgaacctgagactttttatgactgagtaatatccgatggccgctcgcaaaaaaaaacagatgggtattgttattgtgtagtgtagtagtgtacatgtaagtgacagtagatgccaggtaggatgattgttattatcttcaaggtgggcaggtgagcaaacactatccctctttatgtttgtatgccccctgttctcctactctcttatcgctacaaacgccctatccaaggcccgtcttggtttcttcgctttcgtcggtccaaacggttgtaagtgtttcggtatcataccagcacatagagcgagcaaatctaccacccatattagcgccgccctctctcctctttctcagaataggacttaccagacttaaccccaaaatcatgctacaccaaaaacaaacattattaaacgtctccctccccctcacccacctcgtcctctgcagcaccacaagcggcaactgcatcatctgacacacaaacccataccccctcagcttcttggtgatacaccccatcacaatctcgtggcccaccgcgctgatcaagaacgtaatcaccgtcgcgttccccttgccaatatacggcctgctcgcgctgtagacgtgtctcctgaggaacgaataaacaggcacgttccactccctcgagaactccatccagtccgtgctattccaccagtcactataaaaatgcctgtccgcaaaatgcgtaatttccgcaaacgccccaagaacatactcgaaaatgaccagaaacacgagtaaaaaggtgagcatgaagggaaaaagtagccaggagatggtctcggacaggatgaggaggatttcgcttggcgaagggggggcaacagtgtcgttaagccgtaaagaggcgtccgtcaaggcggggaggatgaactcctctgaaatgatcgtcagtaagaagatacacccaaacgtggcagcgattttgctgaggaggttctgccagtcgatcttctccgtgcgggggtattcgatctcgtagcagagggttgggcagcacaagaagtcgaggtagttccaccaggtgaggttggatgggtaggtgatgttgcctatcgggctggtgagctccctggccaagacttcgcgaagctgggctagctcgtcggattcctcgctggattcgtggtggtggtctttttcgaggagttggtgctgttgagcgctgccgtttgcgcttcgcgggctggtggcaacggtgcccatggggttttcgggggttgggtagaggtaggctggggcgcgggaggcggtggatgggtcgtcgaggtcgcggagacgtttttcggtttcggagagatggccgttgtaaaaggcgtaggagtgcatcttcatgagcatgaccatggtgtggaggatcaggaagacttgggctgtccaggtccaacctaacagaaagggcacggcgatccagagcgccagccacaggacttgatatatgctcatgatggctgttccgcctttggcccaggtcagggagctgccggcgggcgcatcgcggaagagcttttgtaaggggagggcgacggctgtgctggcgaccatgagaaaatcagcgatggcgagatgccagagcttgacagtaaaaaggctccatatttgaacgcgcattgggtatccggtgtcctttacattgcgcaacatggtggtgacggccatgatggccaggccgatccagaagaggttgaagaagccatggaagtcgcggtagtcgctgttgggatcgaagtgggaaactcgactggcgaactcgatggtggggaagagacgtcggcgttgctctgcgcgaacctgcttacgggcggaagagagcgccttgacggactgaggagcatctgggggtactggtgttgatcggccgctatgaggagagacgctgtggttagccagttgccacacagctatcgcagctctggcattcgaattgactcacctagtggtagccgtggcgtgaccattggtatttggatcaagagcgccgtttggctcggaaaggttactgatgtgggagagctgggtatggactggtttcctggggcgcgggcgcaagatgcgatcggggccttccgagacatcggccgacgtggtggacgacattgctagatacgaaccgtaagtagcacaacacgagcgaaaactaggacggcacgtgtagatccaaaggttcgagtgcggttcgggtcctcaaattaaagtttccacaaaagcttcaggggaacgcgcttgtggtgacggtatcaaaagaacagggaacaacaggcattcgatgcttgtcaccctgaccctaccaacggaggaaaacaagaaatgaaggtatcatgagccatgtccaactcgcaaactcccttttagcaaccgttgatacgcgtacaattggcctcgagaataattagagtgaccttccactttgcgaccaacagtctcggattgctcggctggcgtcagcttcaagaacactacgtcactgacacgtgactagcaggggtccaagacattccaagacatccgtgagagtctttgattctctctttccggtacacttcgaatcgccgcctcgcaaagtcccaaaatcccaaatgcggtgctgcttcggaagacgtgggtcagatctgagccacggcgttgacgcgccgcaatatatgtttcctcgagatgccttgagaggctgacgctgatcgggcgttagtgcgctttatcatggccccttgggctgcgcgggacgagccgcttctctcgattattacagacaagtacggaccagatggatagagaaaaaagatacgggcgacagaagctttctgcctagtcgaacaccaaaaaagccacaaagcaattgggtttgcctattctgtgctatccaagacaaaaacgtcaacggacacccggctcgcccggatctacggcaccaccatgaggccccagttacgtcaaacaagcagaagcagctcccgatggcaggttcaaataaagaaaagccggcaatcatggaatgttgaaccgagttacaccattttggggaaagccttatgcgtgagatgttgcttcggaactcaaaacacagggcactgaggctgtgtccttgttggcgacactccccattgcaccggaatttctcgccggcatcatatgtgccgcagaagtgagtggatgggctcacaggttgggctatgataccgagcgactttcatggagatcctttctgttcgtccgactctgtgtgagactgggggaccaatagatatccagaattgaccatcgtggtgttgcggggcaaagtcagacgaggggttgggctcttggtcatccctcccccaccacctcccctctatcttttttcgatacaccacggccaatcttcagatcgatatctcgtgtggcggttgtctgaactcaactggctttttgttgcttgttatctttgcaccataacagagataggctgcttacactgcagtcaacatctggtaaggaaaaggacagggtatcagccgaagacagagctggtatctcgggagtcagagataagatgaaagcctcatcagggaagcgatgcaacgagaaagatatttttgtcagccgccttctaagaacattcctaattacagcaccatgacggcaagtttctttcttgcgtcaagtgtcttggcgatatctttgatcaagatggaagaatggccttgaagggtatcaacgggacttctgttctttgtctcatccggcttgtcagggtcccatgatgttgaccgcccacatggccgcggtccactgatgaattgcacttggtgagacggttcgatctccttcctgtcttgagacggtcacacaagatagaatcccccaaagcgttttgggcgatttgctgagtggcgggcccattcatcgccaaatggacctcgcctccgacccgtgcccctgattgtgagtgtcatgggttcaaataactagcactatcataaaggcgctggatttcttccgaaattcaacgttacctcgagagtctcgaccccgatccccgtcaacctcaccttcaacctaaccctcaaaaaaacaaaaaacgaaattgacaaccgggaccagctgcccggccaggcaaggtcgcagcccgcatcgtcaccaaccaaggtactaaagattacaagtggagtttgagatcacgaccagactttctctccacgccagacgggcatacaaacaggtcacaagcgcaaggcttgcgcacgccctgcgcagcgccttttctcccaacgcgcacaacaagagtgctcttgaaaaaaaaaaggaggacttttggtccgggagtccggacgaggacccgatatcaatcgatttcttcccgacaccaagcaaaccttggacggttatcagcagttctcgtcgaaccaccactctcccactctcccactgggccacaactgcagcagcgcctatctctgagtggctttctgagacccagtcgaccagtcggcccacgaccacgcgcagcaagcagcagcaggagtagcagtacatcgcatcgcatcgcctcgcctcgccgtgcctcgccgtctccctccctcgccgtccaggtcaggtccctctgttcgtccagtgcaggtcgcaggtcccggtgcaggcacccttgaggcacccttggcggattgggcgtccgggagaagccaagcagaagccgcagaacaccccgggccccacccagccgcccacaccccagtctgggtgtgctgagtgtgcccactaaaaggttgccctggacggtgtcacgctccgcgaaagtgactgcgaaagtgtgagtgtgagagtctggggagggtcccacggtccccaacatcccgctgcgtcggccgaagttgcgctgacttctgacccgaagcaagcgcagccatggcttcgcggccaccccatccagatcccataaacctcccccaatctgctccgtcggtgctcgtatcctccgacagacgtgacgacaccgatccccatcatggccgcccctacgagcctgcggcttccatagctgccgccagaggccgagagcaacacgatttcttcgcccctactacctctgcgcaacccaaacccgcgcccgattcgacctccccttacacagagacagcagcaggtgtaacgccgacctctggttcagtccctcggttctctctgagtcctgtgcaattccacgcccacactacagccccatcgcctccccctccgctgccggcccggtccgctgctcgttctccgtcctcctcgactcaggacccgttcgcccccccgagtcacagcttttcctcccaacgaccggcccacctcggcagcaacgccctgcggctgcaaaccgaacttcgtcccggctctcccccgcattcgaactcccaccacggcttcacggcgcccgcaaggaacccgaagccctcgccgaaactctccttgaggcacattccttcggcctcttccctacgctcgatcacgagaacgcccagcttcaaggccggcagcctgtccggtgcctttggttcagcctcggctgcgagctcgaccgtggcgagtcctgtcattgccgcgatgggcgacgttactcccttgccttcccctctgctctcgacacattctccgggaccatggaagcgccatgccagcgaagcctcggccttgcggtcaccagtcgacgatggtctcccagaagcgattccagaagaccccaagacagcaaccaccccgacaaatgcaaagttccgcgggtatgcggcgctctcatcacagcatgcggcggggatattggccgagaatgcagtggccgaaaggcctggataccttgcgaaacccaaatcacataccaggaacaggagtatcagcgattacaagccagatccaatgttgatacctaagcggatgtcgacagtttctggatcgcgcgtgaaagctgaccatgcgagcctttccgaaccacatatgcggcgggagcgtaacctatccgaagcacgaggtttgacgcccatcgaaaagccacccactccacctccgagcgagtcctcactcagtgccacagaatcatgctcctcgtccaagagctcgacggcctccctcaccagcaccaggaagcaccctccaccagaatactttgaagcctttggtaggcatgactcgaaacgacgtcggtggagggctattgggcagctgggccagggtactttcagtcgggtcatgctcgcgacgagccagacatcacctgcctcggacgacgaggacatctcccctagcaccgtcccagtcacgccagatctatcggcacagcacgagcggcgatcgctcgttgcggtcaagatctgcgagcatggggctctaggcggcgcctcagaagaacgaatcgagatgagtctcaaacgtgaactagaggttatgaagtgtatccggcacccatctctggtgaacctcaaggcctggagcatcgaatcgtcgcgggcgatccttgtcctcagctattatcccggcggtgacctcttcgatgttgccagtaaacatcgggacctactcagccctccgctcttgagccgcatgttcgcagagttgataggcgctgtcagctatcttcacggcaagaagattgtccatagagatataaaactcgagagtgagtgcttccccccgcctctacatcctcgtaccttttgattgcatcatgtaaatctgacttcggtgttagacgtcttggtcaatctcacgccggaggaactatgcgtgaaagacgtgaactgggcggcgtacccatatcccgtcatcacgcttagcgacctcggcctctcccgacaagtcgaggatgacgaggtgctcacaacaagatgcggctcagatgattacgctgcgcctgaagtaataatgggccagccctacgacggccgcgccaccgatgcgtggtcactgggcgtgcttctctacgcgttgttggaaggcaggttaccttttgacccccaccccggtgctggcgattatgccatgcaattgcggatgcggagtcgcactagtcaccgtatcgcccgcatagaatggcggtggatcgagtacggggtcaaggacggtgaggatggagaaggggaccacgaagcggaccttgccaagtttgatgccaagggcttgaccggcgccatggaggttgtagaaggacttctcaaacgcgcaaagagccgttggtctgtggccaaggtggccgaaaccaaatgggtgtctgatgccatccaggtccctgacggcatcaagtttagagaggaagaggaaggtgaggaagtttaacagcgtactatactatgatggacggtccaggctgggtgggtgttatccgcacccggccggcacgaggcatgaaactcctcttgacctctcaagcggttaggtagggaagagggaaagggaaatgcggtatggaggtataggatttggcatgggaaccgagtaatgaaagccagggaatcacatgcggtcaatgggaagacgtaacaaaggcttcttggagggcagatgctgaagagggggatcactcctttctgagattcttggggtgtttacagtttgttgtgggataattccacgacgtcggtgttgtttttttttttgcttctgctcttttcttccagcgttggaggaaaaccatgttttaaaagagaacaaaattgaaagacaaattatgtgtggttttccgctgtatgatgcactgacagcacagttattggagtttttgggtattgttgggaaacaagggggacaaaacagatcttgatatagatcttggattggttatcctgagcgattcatggcgctgggcttggtagagtttagctacatttatatatccttgtctgaagaaggctcacaagctgccgctgtttgttggctggaagcaacagagtttgaagaaaaacactgtacaatcatagagctccaataaaagatggaaaaaataaaagtcgaacccatcttggatcaagtgaaccgtaccatggcgtatatgattcgttgatgtatgcagagaaatgacgttcttgcaatggacacaggtataaatcccaacataaaacacgaataggttgctcagactgctttaggtgattgcttgttctatatcactgtcaacgatctaaggacgccaatatatctccacgctcaagtctatacctcctcctgtttatccataatccagtctcgtgtgtggcctccaacccagatgtggtgtggattcccactttcttccaacacgcatgcgcgtacaaccatcccccagaaaagaaaagcctctaccccagtctcatatatctgacccttctcctctttacatctaccttctctacctccctccatacccttttcacctcttctcctccccccaactaacaaacctcctcacgtgccacccctccaactccccacacgccctcccaatctcctccgtcaccacatccacattctccatctcactaaagatgttaaagtgatgacccggtatatccaccaccttggtgatcaagccctttctatacccatcccaacccaagtgcttatcctcccgacaaacatcaaccctgctgaccgtcccctccacctccccaggaacaggcaccttgtcctttgccctgagaagtataaccggaggtggtttccttccctcccaagaaggcaactcccactcccccaccattctcgagctctcagaaaaacacctcgtcaccttcctcttcgtctcctccttcgtatgaggcccccaggccgccccattccggatgatcttcaaaaacccctcactcccccctctcctccaagccaaaggacagacagagtcaatcatgactatccccagcagattcaaccggctaccatccccctcctcctttgccagctgagacgccacctccagcgacaagagccctcccagtgaccaaccaccgatgatcaggttccccctcgggacgacagacttgatgtattcgatgtagaggctggccatctcaggaatcccgccggggaacggctcgccggaatcgtaatgggggttggagatgccgtggagggggcggtcgagctcgttgaggcagtagtaggagaatatcgtgccgcctccgtcgtggattagcaccaggggggtggggggtttggaccagagggaggacgacggggaggaggggccggtttggattagggaggggttgtcggggaacatcttttttcctttctttcttgataaaacaaaagagtcaaagtttgatggttcccaccggatgtcgttccctagacctcttcaaaattgcacagcccaaagtcggatgttatgaatcgtgaggagtgccaaagacgtgatcctcacttggtgtgtgaagcttgggatcgaagttgtatgttgaggtattgcaaacgctacacgctttgaaaactcactctctcacaatctttgaatctagtttgagaatctcgtttgaaaatctcacttcattcccaagtcgtgatgccggtccaaaaagcatgtctgagtaacgtcggaatgcctgctggctgtgccaggattatgttcgtcagccccgccttaatgctgagctcatgcaagtgtgggttgcagtttggcctcaaaccggacatgatcgatattggagcattgtttcggcgggattctgcctgtcttatcaagagattactcagggttagggctgggtatacatcaccccctgaaatcaccgaactatcctcacttgattcacgtatcttcattgcacacatgtgtaagtgaacgggtacggaaaggccagtgcttcgtaaaggaggacacaaagagaggttctataatacgaaacaataagggtttcaaagcacacagtgtgctaataattacaaagctatctatcaacggcttctaaagccgagatctgaaaatcgcaaatgtgaagcccatttcaagacgaaggagaagagaacgacaagggcgtgaagtggcgctcagaagttgaatcatgcccagtgctccagttaagctgagtagacgaggcacaatcagtagtccactccgaggctcccaaggtcgaatcattctgagtctctaagccaagctcatcactcgaatcgtcctcaaaagtcgaatgatactccgcaacagattcggcctcctccacaggggcaacaaaatgcttgcgaaggaaagagagaaattcgtccagtgtagagagagggccaatatgagccacatatccatccggccgaacgaacatatacccaggcagagactgctcagagaagccgaatcttttgaggagtgtctccttcaccaactctgaaggccagatataatagtcgttcaaggcgattgcaggttcatctttggcctttcggtagataaagtgcacgtccaacctgaaagaaaccgcgctcaacaccttctctctggcatactccaacgtattggtctgttcttcggaatgttctccagagaacaacaaaagatggtgggaactgcccacgcagagtgcctgtacggtggtcgaaataattcccgtgtttctcgatgtcagccagagctttccatcaggcagacggtcccctccctgaattcgaccatcgaaacctgcggcagttccaacgattgggctcactccacgatatgtgacaccaaacatggacagaaatttgtagaacgctctattccaccaatctgtgggggtgagccatggcaaaatgtatctgactgcgaagttgcgaatgggtatgaaaaagcgattggtgctggtcatgaatgctattcaaactgggttagccgtttgttcaaataacatatttcataatgacatactgaacattcgatccgtacttgacaaaagctcttgtccaatggggtgtctttcgatgtggtatgtgtccaggaaggcgtctggatcttgaacctgtccctgtaaaacaaaagctagtttccatcccagattgatggcatcctgaattccggtgttcatgccctttccaccgacaggggaagagatatgagctgcatcaccagcaacaaagattctcctgtcgcggtatttgttgacacctttgaggtgtagtcggaacctgctgatccacaccgggtcttccaaagtccctgagcctggaggggtgaacttgtcgaacaatgactggaaatgttcgagagtcggcactgaactggtatcaccttgttggtcaaacgtggccgccggacctgacaccacaatacggaagaggtcttgacgaataggaaatatggcaaacattccctctcgggaaatctgcaataagccttggtcctgtcggcggaggctgtccctgatttggacgtcgcagaggagaaaggattgcgggtagctcgacccttcccaaaccatgccttcacctgcttgacgaacaacagagcgcgcaccatcacagccaatgacgtacttggagcggacagcttccactttcccattgtgactttgcaattttgtggtgatgactttgtcatcctggacaatgctggtggcggtaagggagcgttcaatattgacaccatgagaagacagcgactcgaggagaaaacgttccgtttcggcttgagagatgttaagtggtagcgggaatctggtgtcgctggccttgaactggttgagcgcaatggcacctgctggtttgccgtcaaggcaaagggccatgccctggagaatacgtccacgagggatgagctcctcggcagcgccatagcgactgaatagttccagtgttcgaggttgaataatcagagcacgactcgtgggagagggagcatgtagtttgtcgacctatcctatttgtaagccgaacggatttccagggcaagcagtgttgttcggcacagaaagatcctcacgattcgaaaagacacctgatgcaataccaactccaaggccaatgccatgccaacaggaccaccaccgacgatgaggacatcacaatctgtggtgggattctcgaccttggggttgtcgtccatgatgtctgttgaataccagctggttgccagtgctgaaggtgcttgttatcctagcagctcaaaactgaaggaataagtatgctgacaagaagtatgccgaggctttctgggttcaagatatcgtcgattcacaagacccacaccgtcggccgtaaatgaacgctttctttgctactggtcaaggagcgggcgctttaggaagcgaccatctttgaattttgcaagtgtcagaaaccctccttcccaagcagagggctaaaagtccgccttaggccatgatagcgatattatccgcttgagaacctctacggcaggtacgactatggtcaacagaccgacccacatggcaggaccgacacaccaagtcgcttctcatgacttcaggcaacttcaagtttaagcaagcttggtgccgagcaactgaatttcttcaagtttgagtgaaatgacctaagatagttgagctattctcatcgtactaatcttagcaaacagatacagtttgaaagaatgatctccgtggtttgaacatgctgcgtcggtgtaagtcagtcaacaaaggcacattaaatatgcgcccactttgtcctgacatgattactagccgctcataagtgacctgactgtcatttgctcgcaccatgcatgattaccaacctgtcaagttttgtaacccttcattcaacattttgtgatatttgttgaaggggcttcagggttatctatgagaatatcatgccatcaggccgtgcaacccttatcgataacagcagcgtaatggagcacggacgtctgtgggcgcttctagtgtacttcactgaaagctcgatggcaaacaaacttccgactcaaatcaattggttcttttttgtctcatgatttcatctggtgtaagggcttgctcttctccaaacatctttatatagaaactacgcacagtatttgtggctggtgctacccgccttcaacaaggaggtgtgttggcttgacttcactcatcactaacttaccaccatccacgatggagctaggcaaatcccgccatgcaccttggaatagagggaaagccacgccgccaacagtacactccagcaactaccggtcaacctcgctaaccgtcaatcctgcgcccacttcatccacaactaccaccaccatctacctctctgacaacaacatcatcgccaaccccatatatcccacccctcagagccgctcccacccaccaccatcctcacatacccccaacccccacaaatccaccgccctcagagcggccctagaactctcccgttaccgcaagatcctccgtcgccttcaatggaagtcacaattcctcgacagcggctaccaactcgccacccaccgcctctgccaggacccccagcaagtagctgaacgagagctcatgttcaaactggactttttcgagtactacatgctcatagagcgagcggtagttcatctcctcgccgtctttggcgtagacattgaccggcacaccatctcagaatccagccgtgacgtttcaccggtgaaacagagtcaaggccagagacttggtctttcaggtagtcgctggggccgagatggtaacaacagatccaaccaccgatatcacgccaacgtcctcgaagccctggataaaccccacaaccccctccatgggatccttggacagggagaggtgaggaagcaacttgggagggcaaaggatcttcggaataggtggaagacagccggggaggagattgacgacgggggcttcctaggtcagcaacagccgagggaatggcagatgacgaagaagatagcggcgccgttggagacgtatgatttgtctaatatgttgagggcgatctcgggtgggtttggggaggcggggcggttggcggaggagtatgtcatgagctttgagtcggtggtgatgagcggtggggagggaagcggtgatatggtcatggctgatgagaatggggagccgatgctggattggggggcggcgattaggaatgaggagacacagtgggattttatggtagatgcaatggattgggaggcggtttgaggctttgttgcaggtgttttggttgcatagcttggttattatttcgaagtaccattgctggagtttgtgggcatcgggtgtgcgttgtgagcgtgttgacttggttagcattgaagctgtcatggagatggttgtggttagaacagaacgacttgacctagataccctgtagtttgaacgacttgtgcatatttccttagaattgatacaacccacgcaaaaaaaaaaaaaaaacatcatggtgaaaagggaatatggagattatgtgcaagaccctggtggccaatgagctaagagcagatggtcgatggtttatatattaggtccacgttgtgtcattcatcgtctcctaccagcaccactcccagttcaaatggtcgattggtatgggtgggagaggggatcttcccagccctggtgagaggtgccggtgctcgtgttcaccacagagtgccgctcatcaggaggttcccgttcgattcctgacgccacccacgattagcaaaatcccaagagaatttttgtagctggtaaaccccctaggttgggaggggggccggtaagcttttgctttttttctgaatattctttttttttgcttcagtcccattgataatgaatggcctcttggttattttttactccaactcagaccctcctcgacggtcaaattagtagtagcaaagcctcggcggatgcttcgaccagttcgtacgagccaaacgggatagatggaaacatgcggtacgacaagactaacacgacgaggtggacacaaacgcgggtatacagagcacgcagcaaggcaaagggaagaggcatagcatgacgattctgcaacggtcatgtaggctcaatgtaccgtacagtagcgcagcctttacacacgacgcggtgatctgatcccagcattacaccggacgtttgcggagaatacacaacctgttgccatcaggtgatactctgacaaccatatcccaaaactcgagagtgttgaacgataacggtcagtaaggctcatgttgtgagacgtctaacggcgagcaaacaagccgccgagatgactcgcattgaaatccagacggtaacgttactcagcctcctgatcgactcgagtctacaaatctcgttggcgaggtggaaaacaacgttggccatgctgtcagacaggaaggaatgctccttccaacattctgtcgcacaacagcctgagctgaagaggaagtcgcacttggtccgaaccaacggatcaacaccttcctcttgtcagcagcaacggtcaagacagatgtggcttgcatcttcaacttgaaccccacagcagccaccatgcggagtcgatccacaaaacaaaaaaaaaacaaaagaacagacttgattgatggaatgcttcacaaccgttgtctctatatgagctgttggagtaggagcccgagaaaacacagctactgcaagtttattagccgcgtaggtgggtaggtgggaatagggtcgaatacgaggtcgtctccaagatctccaacgactcccgtgactaccgcttagcgaccccaattgccgatcttcagtcgagacccactgccaactcaacatacgcactttcgacattctagaaacctcgtacgggaaccacggactcccgtctctcgtgaagagaaagacgtcgtcagcatcccttccttcaggctgagcttcatcgtatcgtggaacaccaaaaaatgtagtgcactctagacagtccggggcgatgcagagcacatggttggtcacggcgttgttgacttttcctccccagaagtaaaccaagattgatccaatgatctggagatgggtggatggttgcagctgcttcggttgttgtttgccaactctcgcttcctcccccatggatgccccatcgcttggctatgacgccaggtagggaaggggcaccgcgatatcgtatcgtatttgcagccctccacatcgtatcatgaaaggcgaacgattccggattcggcaaccggcgggctttgctttcctgctgtgtgccttgggaggtgaatcgctcggatggagtgctcctcacgaggctgatggagctcagagaaggagcctcggggaggggaaagcggagggtataagatctcaagcctgtcctccacctcgacttcaacctcttttctctctctctctctctctctctcaatcaccagctccaacagtttcaactccgttcaagcacgcttcttctcggactcagcatcattcagacgcatcatttctcttcttcaaaaggcacaacttgcgatattccaccattatgcacttctccaagatcttcagcatcttcactcttgccgccgcggcgtcggcaaccacaggtaagccctcattccgatcacctcctttcgtctctcgccacctccccgatgccaactgacacaccctccaacagtctcttacgacatcggctatgacgaccccaaccgcagcctcgagtcggtcgcctgctcggatggcgtgaacggtcttatctggaagtacggctggaagaagcagggcgacgttaggaatttcccctttattggaggcgctcaggcggtggcgggctggaactctcccaactgcggcacttgctggtcggcgacgtggaacggcaacactatatatgtgctggctattgaccacactggctcgggccttaacttgggattgcgcgggatggatgctctgactaatggccatgggcaggagctgggccgtgttgatgctgttgttgctcaggtgcctatcagtcggtgcggtctctagaatgggttggatgggcatttgtaaggggcgtgaacattgggttttgacatcatggattgggcgggagtggaattatgatggaatgacatactacttgtaatgcagtaatggaaggttatgacatggttatcgtcgatgctgtggtatctgtgacttgaggaaggcggtgatgtctgtgatcatttcgggatagaaccagtggccgagacctgggtattcgttccaggaggtgttgacgctcagttctgagagagtcgatgctgcctctttgccatgagcgatgaggactttgtcatcttcggttccatgcgccagaaacacaggtgtatcaaaggaatttggacgagtgataggactgttgccttccagctccagactttctcgcaaagcctgcacagcagcagcttcgacatcttgcggcttgtcctcatcatcctcaccattacccccaaatgggtcaaactcatcttcttcggtgtcaccctttctgctagcgaagtctttcgtcgccctttgaactgtcctaacaaaaggcaaccatccgcacattcccacgcagcggcctagtggttccccttcccaaagcagcaaagccatcaacgaagctgcacacccttgactcaacccgccgaggaacatcctcctcgagtcaccacccaccagcgcaatttcctgtctgagtagatcatggagatatgatgtggtctgttgaagtccgtcaatagacctccactcgtcctggcctgggttgaggaccgaggcgggggagtcgaggtgccagccgtcgaaccattgggtgatgagggagcgggcgtagattgttgctcgggactttggggcggtggggaggatgattttgagagaaggaaacgattgttggaggggggagcagaaagggaggagggaggagggggagttgcctctgccgtggaggaggacgagtgtgaagctgtgaggggggttgagagggggaaggatgagagggtcggggaaggggggagacattttgtgggacatgaattgggtgagagagggggaagaatggggaatggaaggggagagacgataggtttttgttcgttggggtttggtctgttggttggtgggtgatttgctttgtcggcagaggcggtatgatagtgaagatgaaatgaaggcaggaagattttgaatgcaaacaacagagcttgaagctatacccatctttgaattgacatcatcacggtggtgtcagggtctccctttgtgcagctgtgcaaggggtcctgcgcaagccagaacgccaagcgcaactttacaccaatcatttcgctgcccggatcagccttacgcaggggcatcaaggtgcgcaagctccaccagcccgcctcgcaacctctgcctgacaacggggagcacatgatgcgacacagcccaccgcctccagcagaagacatgttgtatgattgcgccaacatcatctgcattgcttgatacttgttcatcattaacattcaaaccaccattgaattgacaactgttgcccattagcaacacttccaccatggcgccctctctgcgcgacatcgtctcacaagccacgagcttcatctcccaactcccactcctcggcggcggcagtgatagcttccaaccaccgagcgatgtctccttctacgatcccctcaccagcggcccatcatgtcccatcgatggcccggtgagctgccacaacagcacaccgattgcagagcccaactcgtgttgctttgtctaccccggcggcaagatcctcctcacgcagttttgggatcagcaagtccatgctgggggcgctgaggaggactggactcttcacgggctatggtgcgtacatcttttttttgttttttattttttatcgcggccatggggggcaaaagagggagatatctacagctgaaagaagaggggatatgcccaagagtagaacttgaccagcccacattgcaatggaaaagataacagcgggaataacaacgagtgctaatcatgcctctcaaataggcccgacctctgcgatggcacctacgaccagttctgcaacatgactccgcagtaccacaacatcactgccgttctagagcagcacggtcagcatgaactcgttcagttcatggatcggtattggctggcatcctcgtgagtcctttttgcctcgcccgaaagtgcgatctctcggcacgggtgatacggaagtagagaagagaagcgatgaagaggatcatgagcttcaactcttccgggccgacctcgggttctgttttcctagttgggccagaagctaacgtttggaactatttaggggaccaaactccagactgtgggagcacgagttcaacaagcacggcacatgcatcaacactcttgcccctgcgtgctatggcgactcgcataaaccggggctggaggtggttgattactttcagcgcgctgccgccctctttcggacgctggatacctaccacgctcttcaaaccgccgggatcgtcccccacccgaggaagcactaccctcttgctgatgtccaggccgctctggagaagtacagtggcgggaaagtggtgctccgctgcggtggacgtcgcgatgtactccacgaggcctggtatgtctactttatcaggggcagcttgcagaccggagacttcattccggctcaggaccgcggtggcaaggaggaagacgctggcaactgtgccccctggatcaagtacctgcccaagaggcacccaagaggagcggacttgtaagaggtaatagataatgtgttgatcagaggggggggtgggggcttgggggtttggttgggttcggcgttgctcggcgtctttgcttcttggtttatggatttccctgcttgattacttgttatagacttgggctgtttgctgagcgcttttgtagacagcgtctgtcagattcggactggatcacccggctgctcccatgtggtggtctggggatgggttggtcgtctagaatatttgggactggtgtgtgtacactgcagatatatgcacatgataacgatacataccttgttgaagagaggtcataccgcagcgtatgccgttgccgagatggtgggaaaggatgattgtctgacatccgcctcagcacagagaggctgctgtcaatacgccacgaggatgatgtcttgcctaagcgatccgagcatgtcccgatggtttctctcctgtttcggatatgatgtatgcggtggccagcagaacacgtgcgccctctggacctaaatcgggaatgatgtagggaggtgttggctataggtcttttcccaatgaagctatcccggcttcaccccgaaaggcattgaagcgtcatagcccgaagacgaagggccaacttaaaggaccgactcggccctgcgcgcagaggtgcaagcgcgcggaggttgggtcgtaaagagggaagaagtgggttcttttgttttgttcaggacgttcttgcaggcccgggtaccaccatatcggaccctacttcgcggccgcacaaaacgtaacccccggttcggacgcaagcgagggtcgaggtggcgttcgagacctatcatgcaaaagctcatgaacccaagccgcccagccagggccgttcaggccagttctccgtagtagctggctactccgagatccgggacccggtcggtgcggagtagtagcatacatacacaaactccatgataccgccggttggctgactggctggcctgacaacacacaaccgcgcaggaggattgtggagagagaggggcaggggggaataacatggagaagtaagtctagcttagctacaactcttgtttaagctatcaaagcttcttctcggatatactctctctcctctctccccgcacctgacatcggtccgaaccccaacctgtccgggaccaaaagtcgacaagcaatgcaaggcaccgccgttgtagccgaccgtttgacgtggggaaacctcaagcaggatagcctccgccattgctcttcggcccttctgaagacagaaaacttgaagttttcagggccatgagcaagtctggggagggcatgatgcgatgatttgtgtcgattaccccacaatattcttcccgaaaacctgggggttttggtctggggaaaaaagaagggttcgaaaccgttaggataagcacggatttcgggaagaggaagcaagataacggcgtttggcaatccctagtgcgaggggggcagtcgataggtgtgacatgttatacaatccatgtttttgtttctgagctcgggagcagctgcaaaatggggttcgcaaaagtggccttgctcgcttgatccgggcatcctgacatgtgaatctgaatccatgtcccatcttgaacaaggctgagaatgatcgtgttgtattagttggcaaggctgaaaccaggtttccccagccctgtgggaatggcgaatgaacgactccgtttgatgtgagagtcgcttccgggagagcagcgcggattgcgcacatgatcgtggtgggatgatggacggtagcgagcgcaacacatgctgtccgtaacgactgagagccagcgccaaggaatgaggctttggagttctggctggtcgttgacgacggcttcaagcagagggcagccttttcggaccgactgtggaggtgtgagggcctgagaccaaaggcgtcgattggtggctcctggggcctctctccgcattcccaagccacccctgttaagcccagctccccagctttttcccgcaattccaatgcgacgttttcaccttctcccgcgagcatgagaaggctggttccgttttgtgagacgtttttttcctcgatctgctggtcgtgacaatggttcgcgatgagaggttgcagtcccggtggatcatattacacccactacctagccagagatgatgtgcataggtactgtacctttgtgtaagaaaacaaaacttgtcgttcggggaaggtcaacaagaatagaagggcaccagatctatgcaggaccggcatgtgccgaatccgcatgacgtttgtgtcgaattgtgtccttcttttggacgcggtccgcagaagctaacaaagaagaggaagcgggcgacttttgagtgaaaagctatcatcatgccattgggcggtgatgaatcctttgctgtaagttgaaacgagggctcgccagttcaagtagaaacggcagacaaggactgaccttcctgatgcaaccatatcgcataatccatcatgtaatggcgggctatgattggccaagacttttcttccgttttgcccaagctggctggagtcccagtaagtatgaatttgggaatgtctgaggtgatgggactcgttgcagcaagacacggtgggcgacaagcttttgactgactgagacaccaaacacgatttgcctagttcagctggaattccaaccgtgcagtgtcgatttcagcttgattcaggccttttgtgatgtcgaagcagccctcaccggaaaagaagcaacatcgaacgccagtgcctctcaggaacgggcgatcattgctatttcaaagcaggtgagccacgccaggcacgatagctggccgctgtaataaacactagacatgtgtgtcgtgccacggtggtgaacgttatctggcagactgagacagaatcggagtttaactaggttcctggaactggtgtgatggtgccctgcatcgtgagactctacattaggacaccttggtctggtgggagcggacattggtttgccatgcggtgatcttggtgcgtcggcctcaccgccatccacctgagcatagcgtgcataggtaatgagaataagaggctgcggataatgactggctataactgtcaaagcacagcctggttgtccctgctctgaagtgctctgctaaagtcgaggggctgcccgtgcgacgtccacgaaaacagaggaagcaacaagattcggttcccatgcgctcccgttcctcctaacggttcacttgtaccacgtctctcccgtgaatatcgatagcttaaacatttcacggtacctattgtactcagtgattgccgatgggatacggatatgatatgagaggataggaaggaatagggaaaataaaatcgcgctgctcggttggttgttggttgggttcgatgagttcctggttgcgtgcccagggcagcgttgtcgccgttgcattctcgtcacctaaccggaacgcactggccaggctgagaaatccggacccaccgcaattagcccactgaactccgtttcttttccagcccagctgctccatcccatgcatccatcaatcccgtccatctgtgccccaggccccattcatctccccatttcccgtttccttcttccccttctgcaacccttttcccgtcccacccatcttcctcagtcactgctcgtccattctcgagatattcccaatatatcaccgcgaccgccctcaatttgtgtttctcatcgcgtcggtgtatttgggcccccagtgctagatcgacgacgttcagacggcctgtcatccgatctgcttgctagtaccgccaaagcccagcgcgccccgcgagtttgacttcgaccacctggacgggccgattcccccagatcatctgaattgactttctggagtccccacgattgagcaccatcgccccagttcgtcccgacactctggatatcgactgcacaagagccagtggatgctggctttcgtgtcgccggcttgcgccgtcgcgtagtggcattctcacccatccctggttgcgaccgcgttgccagcactaagaaaacacaatgacgacagccgtgaagagggcgtgcgatgcctgccatcgacgaaaggtcaaatgtgatggaatcaacccatgtcgccactgctcggcttcgcagttggcttgcacctacaatgccattccccagaaaaaggggcccaaggggtcccgagcgaaggttatcaatgaactcaaggagaaccaacgccagacgagcctctcttcgaagcagaacccttccaacagcccgagcttggcccctacaccccgtttgttgaccaaggagatgatcaacgcttgcgtcgaattctttttcgccaatctgtaccccaccatgccgattctggaccgccagcgcctggagcaggatatcatgtacatggagcagaatatcgatagctactgcctcttgacatccctgtgcgcctttgtgtcgctccagcccggcatggttatgccaaacatgggcatgtcgtccatgagcgatcctttcaacccggacatgatgtttggcggtggcaacattctgacctgcacgttgctgatggaggagacgattcgggtccggaagagcgaggattatgcggcttcgcgcaccatcaacaccctctgcaccgactttttcctgtttgctgtacaccacggtctggagatgcacgacaaggcttggttctacttgcgggaggccaccacattggcgcacctgtcgaggatgaacgaagaaacccagtacatgcagtacgacagcaatgacgcagccagatgcagacgtctgtactggctgctctttgtcactgaacggtgcgttttgacggtgccctgctctggtataacgtcaattgtggatgctgacagtctattttagtgcctacgccttgcagcatcgtcgtcccatgactctggaagcaacaatcaacctcccggcacatgctgacccctccaatcctcactcgcatcacattcccagtttccttcgccacattcagctcttccattctttcgaccatggtctactttccatgtggatgaagaccaagcgcgaatgctctgactcgtatctcaccagcctggagaaacagctgcaggaagtcctgcccccatatctcaacgatactcaggcccagctgaacgagatgtcaatcaaccttcactggctcaaggacatggcctggaagctgggtcttgcaaacaacaacggccatgatgctgagctctcttactcctttttgccaatggttgcacatttcccaggaaatctgggcctgcagggctttggtttcctcgagaagctgctcagcatcacatacgacctctccgaagcactctctatgcaaccggctcccaggacgcctttcacccctggcccgcatgatcagctccgaaagatactcaacattgtcacgactctgcgcaacggacaacaccacttcctgcctctgcttctcagcaagatacacgctgctttgccaaagatggccagccctatgctgcagaacgccccggaaagtgcggcctgcaatatcgacatttttgacgggtttggaaatgctggcatggcacagcccccggtttactcgcatgagtcgtatgataacaaattttcgatcccacgaatcgaggaccacaactcttcggattctaacagccccaacaacatcactccaccgagcagcaacgatatgaattcgccctttgttagctcgccacccatcatgtcccccggcggcatggacctgcctcatggtatgccatccgactttacctcaatgccagaaatggtcatgagtccaatgagccatgcaccgccgacctcgttgggtgccactgttggcatgaacaaccaccagacacaacacacaccgctatcaccctttccgaatctgggttcgcaaatgcaaggaatgaacaaccacaacatcaaccctcctccaaatataggcctcgcttctcaaatgcatctccctcagccgatgggagggacaataggctccaatatcggcagcaacatgatgtcgaggccacaagcacaacaacggacaagcagctttgcactcgggcccacaccgattcgtactgtaggcgattttcaagcactgcagcggaccaactcagacatgacgcccatgagtccgctgcatccaatggggatgggctctatgggaaatgaaatggacttcaacacgcccttgaggtagtaacgctggattgggggacgcagcatgagggaggatttctcttttcctgttcatcttctcgacctttggtcacaccacaaccccctttttcttttgtatcggtcataaaagattcccacaggcattttttttcattatctggcatcttatcatcggagtctattggatggcgtacctgctagccttgctgtcgatttggatatggttccccaggcgcacacaaatcacgagtttttggggaagctgaaaaaatgggagcacactgaaaaaaattgtccatcacagcgcacagttttcttttgtttcggatcttgcttcttggaaagcggtatatttgttgggtcggcgagtggggaatttgaggaatatgggcagacgagctctaccactgtgcaagggataatagcatgcagggggacatctgatcttgtacaagggtgctagggaggacggcggggaggaatgcaagcaatatacagtgtttttagttactgccgtttctgcagcatggttcgctactcggccaggctggttgtaacaatagagtctcgtatcttagcacgttgtccgctgtctgctgtccctgtgtcttgtccggtagtggaaccagcggagggagagatcatgcaagataccggatattgcgggggcttgttcgcggatggctgtacttgaagggatgtttccaaagagctaggattccgacagcacggatgagtagattgcggcataacctccaggttgcaacacttggacttgaggtactgtagcttacttgcattgataccggaattaagagaggaagttttacagccaccctgcccatacaatattgcgaactacaccttgaaggatgacaactaggctttccaatagatagtaggcctttgaagatatgtaaaaggcccattaatttactttcgatgcatggtttacaacatcatatggaccgacctacttgtgggtatcaactattttgtggtgagggtgccaggagctacttgtccgattcgtgctgtctttgtgctcgcgcaccggctcaagcccgcacaccgacgaggatatgtgtaacaggagcggcatgaagctattggaaggcaacagcagcagagggcttgtgaccggccttccccagctcgggatccagcaacgtccgagtcgagagtggtttatcatcgagcctacgattcaagctcacaataccgcagccactatgaccgagccggcgccttctctcggcggccgacttatgcaacggttcaagctccaagaaaagctccaagcccgaacggtcacaaggttcaacggtctcctgaacgatgtgtatcttacgtctcaagggagcatctaacggaagcaatttctatcaaaaaaagccaatataaatatcttgggcaagattcccctcgagtcatttcttttacgccatcagatcgatcttcatcaacaggcaaaagttccaatctctccgccctcgagtgaacttgcatatctcatttaacttcctattccgtccaccaaaaagtattcccccctttcttcaccaaacccgcccttacatttatcaacaaccccatccatatctataacctcctccccccaaccccccccacccgnnnnnnnnnnnnnnnnnnnnnnnnnnnnnnnnnnnnnnnnnnnnnnnnnnnnnnnnnnnnnnnnnnnnnnnnnnnnnnnnnnnnnnnnnnnnnnnnnnnnnnnnnnnnnnnnnnnnnnnnnnnnnnnnnnnnnnnnnnnnnnnnnnnnnntttttcaaatggcttccaacaacacctcccccatccccgtcgccacctttggcaaagacccgaaagtagccgagcaagtccgcgagaagctcctccccgacatcgaagtcgtccactgctccctcaccctcgactcggccctcgccgagctccccgccctctgctccggcgacacctccgtctccccttcctccggcctcggcacaaacgccggtgcttccgactcctcctcccgcaaggtcccccaggccatcttcttcgggggcggcttcacggacgacgagtacgagcagatcgtcgccgccgtccaggcccgcgctccgggcatccacatggtcaaggtccagaagcgggatgttctcgccgcgggctcgttcgggccgaacccggacactattgccaagatttacaggaagaagatggctgctctggcggctgcttaggtcgtcttctgaccctcatcgcgagagtggtggaagggaggaagacaggggtggatatggggtgctggatggggaggaacaagtcacagcaagggtgagagttgtggttatcggtgatggcggcggcaaggaggatgcaagactaggaatctggaacaccatcttgacggtgggggtgggtaacattgcgactttgtatcttcctgtttctgatctcgatgctttgtgtttgactggggggaagggtatgtggaacgacaagttgttgaagcatgagggtgaggggatagctatgggtgatctttgagcagacagtgatacacgagttttcttttgctggtttcacactatcactcactcgctcactcaatcaactcgttcacacacgcttgaaacagtccacactcctgactggtgtgtccgctgttgtatgcataggtacgctgtgacgctatgaacctctcttatcccaagagtatccccccccattccgcgcgcctatacttttttcgacctgcagcagaaaagagagagcaccaaggccaggaagaaaagcgagaattccatgtgagcagaaaacatacaaccaaaaatgaaatcaacagagccaatgaccactaaaccccctactcgcaaatgaaacaaaagacaagataaagacggaaaaaaaactgtatccctacaagatttcccccaaaagcaacacgacttgtctatctttcccgtccacccagaaaaaaaaagacagccgcgccggtttcgctcaatgcaagatgtcccttttgggtccaatcgctaaagccttcccttaacccacgccccccaccccgtatatacgcccagcctgccccggtgtgatcatcgcaagcaaacaacgataggaaccataaacaacatgagatcgagcgcgaatccaattcccaaacaccttgtgcccgtccgtgccccaccagttcgccaaactcaaaatagaccgacccagagaggaacgaagcgagggaacgggttaaggagcagggtgcgtcattcaagtccgccggctgcttggtccaaaatccggctccacgactgctctcttgtccttgcggggccggatcacgtactcggccatgatttgaatgtggtcagatgggaagtgataatatgggaagccaggaatccgcgtaagagcctgcttgtccggaggagcaagcaacgacaccaactccagcgtgttggtggaataccagatgtagtcaatgacttcacggaaggttggtgtgtagttggtgaagctaagttcatgaggtccacctctgagatgggcataggccgaacggatgctgaaggggtgctcaacaccgtctctcgtgaagtttccgtactttcgaccaagccattcagggtgatcatgggaaagacgaccagtggcaagaaagtcgtaaacgccactgctgggcgtagagttgtaatcgccgcagatgatcagaggaatatccgtgttgttgcgatactcctgtgaagggcctggcggaggaagctcctgcctctcctctccttcttcgaggatcccttgaatcgcttgctttttgtcgattgccatcggcggggttcgtgtccacttatcgccgagcctcgtaatgttctccatcagacacgcgatctgcaatagcttcacgtcgcaaagatcaggttcccaggccagatgcgtgttggccacaatcaagcgagaacctgttactcggctctccagcaagataatcgtcccaatattatctttgcccatcgccctgttgtaaacgtcgtggttttgcttgagatctgggcgggtgatggtgaggtgtgaatagtcaagcatctccttttgcagtacaatccacttgtcggtcttccagaaggtagcacagccgtcaacaccgcctaccatgttgttgggcaatgtcttcaccttgggtcttgaccactgtatacctctataaccgtgtttggccagggagggagagaattcgttctcataggcgttcctgctgatctcttggaggcagacgatgtctgggttgcggtcatagatctcgtcgaggatcaactgcttgcgatagtcccattcaagagctgagggcggtgtgtagccatacatctgcttggtcgcgtacctttcgcacagaatattccacgttaaaacgctgacacgttcaaggctagacgccacatcatcttgcaccgtgatgggaagacgaggagcgggagcaggggggactgcagagggcgactatcagtatgtggcgtgcttggttcaaggtggtcggtcagaaacttacctggagcgtcaacgagaagactgttgatcaagctcttcgtgtccttgttcatgatttcgtctttcaacgggccgttcatgagtgggttgccgtggagacccagcatctccagcttgtaaaggaagcccagttcatacggaaggcttgttatgtgattgttaaacaagataagctgctggaggtttgtgcacatgccgatttcggggggcagttcatgcagttcgttatgagacgcttccaacaccttcaagcaccttagtttgccaatatctggaggcaagacggtaatcttgttggacgcgatgtacagctctacaagaaaatcgtaactgaacaaggcccgcgcaatcttgcgcaccccttgaccgctcaggtcgaggttgtgccaatcctgtcgtttgacaagcttgtttgtggtataggagggccggtttctagcgacttcctggtcctctgtagttgtcgttccttcggaagcatacaccacccccttgttgtcggatgccttggcccgtgcataatagtgcggaaggtgctgctcaaccatggtttgatgcgcctcctgtgcttgtttgtacaatttgagctgctctccccaactgtccgagattgcttgaccagaaccacctctagtggtggcagtttgcccgctaggatggctcccggcagcaaatgggctagaggcttgatgggcgccggtggagtagcttgaatgccccatgttccccgccggtaacccgtgtacaccggggtctggctgaagattctgatggtgatgcgcatgatgctgatgtggatggccctgtggctgttgaccgtagttgtactgttgatactgcactggcggaatattgggctgaccccgccctggagcgccactgaggcgattgttgtgcccctgctggggcccctgaccatacatgccgcgcaggttttggccaagagacgccgatgtcttggaatgggcagtgggttgggcggccactaggtgtgacaaaagggagttgagcagtatgccgttggcgatcgagctgctggagctgaaattggacgaaagcgggctcgagaatgcttgtatcggatgtcggtcaccatctgccatctacaaagagggcggggctcggcggaaaaggcttgatctggcgagcctggcacggaaaagaggggggattcgtggcggagggtggaagcgtgtgacttgagatgctggaggtggaagattttgcatggaatagacgaccttttctttgggcatggatgcaagcgtgtgagcgtccaaccggggtcgagttgacggagaatgcagctcgctcagagagccattcaccgaaagatcgaagagatcgaagggcgaacggggggagccgccaaagaactcgaggagaatcgtcggacggggaccgagagccaacgtcttgacaagagggccaagttcgccagcaggttggaggggctcgggacgcgcgcgccttggttgtttggggggggggggtgtgaaagagatgctgaggtcgggtgtctctatttttttgtttctgttttccgactgcttggggagcacgcgggttagcaaaatctgtgtaaaagatgatgttgggacacgggccgtcacgacagcgagcgatggcaggcgaggcgagggaagcggccagacagccaaggtcaaagtgcagccagggccagagattctggggccttgacagggcggctcgggggagtaaacagggctcacctgtggccaaagataaagaacgggtattacctcttgctggcgataattggagcgcctgtcaatgaatactcaagtgaaaggatatgctgcgcgattgctgatgtcgtggggagagagaggagtccaacccgtctgctgttgtggcccgctgtgatggagatgcgcaaagatagcagcgcccaaagcctccctgcttacctaaggcccgtgggcccagaccaggacccagtgaacggccgtcacgtgatgagtgaaatcattggatgctcctccccctcttcactttatgatacaaggcccttacaagcactggcattctctggactttttaaaggcaaaagtttacttgacgcccacacgtcaatgggtttccatctgagtccctcttcccacctatctgtctacatgcaaacctccataggcacagacatcaagcatgctcctacactagcccagacagacacggaaggaatacactgcagaatagcggtcgcccagagcttcaaagccaggtcggttggagcataggtggcgcttctgatgccaataggaatctctctatagttctcgggctaggcctgagcagaggctgcattgcatttgagaggaatgagagaaaacactgaggggcggagtgcggggaagcccagacccatcgaggtgtgtctgcgaggcatggcaagacgagcagcctatgacaggcatgaaaagtcccaataccgaaggtgaggccggtggccggtggccgggagcctgtgctgaacagtggcccagaatgcccggaatagctagaccgaaccaagaagtgtactgcacatgcggtccaaaggcagggcatggcaagcaattgaataagaagaatgggcccctggcttctagccagaattgtctccagcttgtccatccagtcgttctggagtctttcgttctctcatccgtcgctgtcatcaccctcatcctcatcctcgttgccatcctcagtccaacatctgaatacgacactctcttgtactcggtggccccacattgaaaccagctggggtgttagaaccaagtggtcgatcttgatcagcatcgcagccaattcgcgcgcaactgcacacatccaccagaccgcgataacgtccctggccttcgaggagctggaaagtcagcgactcacatggctgctgcatgtcgagggtatccttgaactgatcgcaagccatgacgaccgtgtctggggcacaccgaaccgacagccaacaacaaaccccacagacagccgtcatctcggcgccgtcggcggtgtgactattctcttaagctgtctgatcgtattcctatgatacggatctatcaccaattcgccacgacgtgtcatatcagctgagaaagccagaggcagccgtgttctccagggggacgagggatttctgggttcttctgacaagaaaaaaaaagaagcgttttcttcagcacctggctggcccgctgggctgctgtctcgtcccgccaaccaaccactcagcactcgcagagactcgaaactc

(The sequence listing continues in the following parts.)

1. A method for detecting and distinguishing between yeast or mold in a sample suspected of being contaminated with said yeast or mold comprising:
a) contacting nucleic acid molecules from said sample with a mold-specific probe or a yeast or mold-specific probe under hybridization conditions, wherein
i) said mold-specific probe is capable of specifically binding to a mold-specific region comprising at least 17 contiguous base pairs within an endogenous chitin synthase gene of said mold but not to a yeast or mold-specific region of the endogenous chitin synthase gene, wherein said mold-specific region shares greater than 72% sequence identity between two or more different species of said mold; and
ii) said yeast or mold-specific probe is capable of specifically binding to a yeast or mold-specific region comprising at least 17 contiguous base pairs within an endogenous 1,3-β-glucan synthase gene of said yeast or mold, wherein said yeast or mold-specific region shares greater than 70% sequence identity between two or more different species of said yeast or mold; and
b) detecting hybridization between said mold-specific or said yeast or mold-specific probe and said nucleic acid molecules, wherein
i) hybridization of said mold-specific probe with said nucleic acid molecule indicates the presence of said mold in said sample; or
ii) hybridization of said yeast or mold-specific probe with said nucleic acid molecule indicates the presence of said yeast or mold in said sample.

2. The method of claim 1, wherein said endogenous chitin synthase gene specifically bound by said mold-specific probe is a chitin synthase class III gene.

3. The method of claim 1, wherein said endogenous 1,3-β-glucan synthase gene specifically bound by said yeast or mold-specific probe is a 1,3-β-glucan synthase gene.

4. The method of claim 1, said mold-specific region comprises at least about 17 contiguous base pairs within the region of nucleotides 2859 to 2968 of the chitin synthase class III gene, or a ribonucleic acid (RNA) product thereof or said yeast or mold-specific region comprises at least about 17 contiguous base pairs within the region of nucleotides 5360 to 5515 of the 1,3-β-glucan synthase 1 gene, or a ribonucleic acid (RNA) product thereof.

5. (canceled)

6. The method of claim 1, comprising incubating the mold-specific and yeast or mold-specific probes with the nucleic acid molecules under hybridization conditions, wherein
i) hybridization of said mold-specific probe and said yeast or mold-specific probe with said nucleic acid molecules indicates the presence of said mold only or said yeast and said mold in said sample; and
ii) hybridization of said mold-specific probe, but not said yeast or mold-specific probe, with said nucleic acid molecule indicates the presence of said mold but not said yeast in said sample; and
iii) hybridization of said yeast or mold-specific probe, with said nucleic acid molecule indicates the presence of said yeast or mold.

7. The method of claim 6, wherein a difference in hybridization signal intensity between said mold-specific probe relative to said yeast or mold-specific probe indicates the presence of said yeast in said sample.

8. The method of claim 1, wherein, prior to said contacting, said method comprises amplifying said nucleic acid molecules from said sample.

9. The method of claim 8, wherein said amplifying comprises:
(a) contacting said sample comprising said nucleic acid molecules with a first amplification primer having a target sequence specific for a 5′ region of said endogenous chitin synthase gene or RNA of said mold and/or a second amplification primer having a target sequence specific for a 5′ region of said 1,3-β-glucan synthase gene or RNA; and
(b) performing a nucleic acid amplification reaction to produce a first and/or second amplification product, respectively.

10. The method of claim 9, wherein said first and/or second amplification product comprises a region of at least about 15 contiguous base pairs that are conserved between different fungal microorganisms.

11. The method of claim 10, wherein said region is conserved between different yeast or different molds.

12. (canceled)

13. The method of claim 10, wherein said region comprises about 20 to about 100 base pairs.

14. The method of claim 13, wherein said region comprises about 60 base pairs.

15. The method of claim 1, wherein said mold-specific probe comprises a sequence having at least 70% sequence identity to a complementary sequence comprising at least 17 contiguous nucleotides within the sequence of SEQ ID NO:153 or said yeast or mold-specific probe comprises a sequence having at least 70% sequence identity to a complementary sequence comprising at least 15 contiguous nucleotides within the sequence of SEQ ID NO:154.

16-17. (canceled)

18. The method of claim 1, wherein said mold-specific probe comprises a sequence having at least 70% sequence identity to a complementary sequence comprising 17 to 100 contiguous nucleotides within nucleotides 2850 to 2970 of the sequence of any one of SEQ ID NOs:1-42 or said yeast or mold-specific probe comprises a sequence having at least 70% sequence identity to a complementary sequence comprising 17 to 100 contiguous nucleotides within nucleotides 5360 to 5515 of the sequence of any one of SEQ ID NOs:65-125.

19-22. (canceled)

23. The method of claim 1, wherein said yeast or mold-specific probe binds to said yeast or mold-specific region within said yeast and mold.

24. The method of claim 1, wherein said method distinguishes between the presence of said mold and said yeast in said sample.

25. The method of claim 1, wherein said mold is selected from phylum Ascomycota, phylum Basidomycota, phylum Chytridiomycota, phylum Zygomycota, and phylum Oomycota in the Stramenopila kingdom.

26. The method of claim 25, wherein:
a) said mold of phylum Ascomycota is Ajellomyces spp., Alternaria spp., Aschersonia spp., Aspergillus spp., Arthroderma spp., Ascochyta spp., Bipolaris spp., Blastomyces spp., Botryotinia spp., Chaetomium spp., Cladosporium spp., Coccidioides spp., Curvularia spp., Emericella spp., Emmonsia spp., Epicoccum spp., Exophiala spp., Fusarium spp., Geomyces spp., Geotrichum spp., Gibberella spp., Histoplasma spp., Magnaporthe spp., Metarhizium spp., Monascus spp., Mycospaerella spp., Nectria spp., Neosartorya spp., Neurospora spp., Paecilomyces spp., Paracoccidioides spp., Penicillium spp., Phaeosphaeria spp., Phialemonium spp., Podospora spp., Pyrenophora spp., Sclerotinia spp., Scopulariopsis spp., Sporothrix spp., Stachybotrys spp., Stemphylium spp., Talaromyces spp., Trichophyton spp., Trichothecium spp., Tricoderma spp., Tuber spp., Uncinocarpus spp., or Verticillium spp.;
b) said mold of phylum Basidomycota is Moniliophthora spp., Sporobolomyces spp., Trichosporon spp., or Ustilago spp.; or
c) said mold of phylum Zygomycota is Absidia spp., Amylomyces spp., Pilaira spp., Rhizomucor spp., Rhizopus spp., or Zygomycetes spp.

27-28. (canceled)

29. The method of claim 1, wherein said yeast is selected from phylum Ascomycoata and phylum Basidomycota.

30. The method of claim 29, wherein:
a) said yeast of phylum Ascomycota is Candida spp., Clavispora spp., Debaryomyces spp., Dekkera spp., Kluyveromyces spp., Pichia spp., Saccaromyces spp., Torulaspora spp., Vanderwaltozyma spp., Yarrowia spp., or Zygosaccharomyces spp.; or
b) said yeast of phylum Basidomycota is Cryptococcus spp., or Rhodotorula spp.

31. (canceled)

32. The method of claim 1, wherein said sample is selected from an agricultural product or process, an industrial product or process, an environmental product or process, a food product or process, a pharmaceutical product or process, a water-based product or process, a wood product, a textile, and a tissue product.

33. The method of claim 32, wherein:
a) said agricultural product is selected from a fruit, a vegetable, a grain, forage, a silage, a juice, a wood, a flower, and a seed;
b) said fruit is selected from a tomato, a pepper, a grape, an apple, an orange, a lemon, and a berry; or
c) said tissue product is blood, urine, or serum.

34-35. (canceled)

36. The method of claim 1, wherein said method comprises lysing cells present in said sample.

37. The method of claim 36, wherein said lysing comprises mechanical or chemical lysis.

38. The method of claim 1, wherein prior to step a), said method comprises denaturing complementary strands of said nucleic acid molecules.

39. The method of claim 1, wherein said nucleic acid molecules comprise deoxyribonucleic acid molecules (DNA).

40. A kit comprising (i) a first container comprising the mold-specific probe of claim 1, (ii) a second container comprising the yeast or mold-specific probe of claim 1, and (iii) instructions for performing the method of claim 1 for detecting and discriminating between mold or yeast in a sample.

41. The kit of claim 40, wherein said mold-specific probe and said yeast or mold-specific probe comprise different detectable labels.

42. A kit comprising (i) a container comprising the mold-specific probe of claim 1 and the yeast or mold-specific probe of claim 1, wherein the mold-specific and yeast or mold-specific probes comprise different detectable labels; and (ii) instructions for performing the method of claim 1 for detecting and discriminating between mold or yeast in a sample.
